(19) United States
(12) Patent Application Publication
(10) Pub. No.: US 2025/0186493 A1
(43) Pub. Date: Jun. 12, 2025

(54) ARTIFICIAL ANTIGEN-SPECIFIC IMMUNOREGULATORY T (AIRT) CELLS

(71) Applicants: Seattle Children's Hospital (dba Seattle Children's Research Institute), Seattle, WA (US); Benaroya Research Institute at Virginia Mason, Seattle, WA (US)

(72) Inventors: Jane Buckner, Seattle, WA (US); David J. Rawlings, Seattle, WA (US); Peter J. Cook, Seattle, WA (US); Soo Jung Yang, Seattle, WA (US)

(21) Appl. No.: 18/268,885

(22) PCT Filed: Dec. 21, 2021
(86) PCT No.: PCT/US2021/064561

§ 371 Date: Jun. 21, 2023

Related U.S. Application Data
(60) Provisional application No. 63/129,288, filed on Dec. 22, 2020.
(60) Provisional application No. 63/155,486, filed on Mar. 2, 2021.
(60) Provisional application No. 63/179,068, filed on Apr. 23, 2021.
(60) Provisional application No. 63/274,375, filed on Nov. 1, 2021.

(51) Int. Cl. A61K 35/17; A61K 40/11; A61K 40/22; A61K 40/31; A61K 40/32; A61K 40/41; A61P 37/06; C07K 14/715; C07K 14/725; C12N 5/0783; C12N 9/22; C12N 15/11

(52) U.S. Cl. CPC A61K 35/17; A61K 40/11; A61K 40/22; A61K 40/31; A61K 40/32; A61K 40/416; A61P 37/06; C07K 14/7051; C07K 14/7155; C12N 5/0637; C12N 9/22; C12N 15/111; A61K 2239/21; C07K 2319/03; C07K 2319/70; C12N 2310/20; C12N 2510/00

(57) ABSTRACT

Some embodiments of the methods and compositions provided herein relate to efficient editing of more than one genetic locus in a cell using a chemical-inducible signaling complex (CISC) system. Some embodiments include use of such systems to edit a FOXP3 locus gene and TRAC locus in a Treg cell. More embodiments herein relate to use of gene-edited Treg cells to suppress activation and/or proliferation of certain populations of cells.

### RELATED APPLICATIONS

[0001] This application claims priority to U.S. Prov. No. 63/274,375 Nov. 1, 2021; U.S. Prov. No. 63/179,068 filed Apr. 23, 2021; U.S. Prov. No. 63/155,486 filed Mar. 2, 2021; and U.S. Prov. No. 63/129,288 filed Dec. 22, 2020, each entitled “ARTIFICIAL ANTIGEN-SPECIFIC IMMUNOREGULATORY T (AIRT) CELLS,” each of which is expressly incorporated herein by reference in its entirety.

### REFERENCE TO SEQUENCE LISTING

[0002] The present application is being filed along with a Sequence Listing in electronic format. The Sequence Listing is provided as a file entitled SCRI351WOSEQLIST, created Dec. 20, 2021, which is approximately 746,677 bytes in size. The information in the electronic format of the Sequence Listing is incorporated herein by reference in its entirety.

### FIELD OF THE INVENTION

[0003] Some embodiments of the methods and compositions provided herein relate to efficient editing of more than one genetic locus in a cell using a chemical-inducible signaling complex (CISC) system. Some embodiments include use of such systems to edit a FOXP3 locus gene and TRAC locus in a Treg cell. More embodiments relate to use of gene-edited Treg cells to suppress activation and/or proliferation of certain populations of cells.

### BACKGROUND OF THE INVENTION

[0004] Autoimmune diseases, such as type 1 diabetes mellitus, multiple sclerosis, myocarditis, rheumatoid arthritis (RA), and systemic lupus erythematosus (SLE, or “lupus”), are chronic, often life-threatening conditions that result from alterations in immunological self-tolerance, leading to aberrant immune activity and end-organ pathology. Inappropriate and deleterious dysregulation of immune tolerance can also contribute undesirably to pathologies associated with allergy, asthma, transplant rejection, and/or graft-versus-host disease (GVHD). The role of specialized antigen-recognizing thymic-derived T lymphocytes known as regulatory T cells (Treg, also referred to as suppressor T cells) in the maintenance of immune tolerance and prevention of autoimmunity is well established, and multiple autoimmune conditions are characterized by dysfunctional or dysregulated Treg compartments.

[0005] As a potential therapy for autoimmune disease, adoptive transfer to an afflicted subject of functional Treg selected for their immunosuppressive ability has been explored in mouse models and early phase clinical trials. However, a lack of autoantigen specificity of such Treg cells, and uncontrolled cell plasticity (e.g., conversion from immunosuppressive negative regulator of immunity to pro-inflammatory effector-like phenotype) resulting in the loss of immunosuppressive Treg activity, comprise two major limitations for the effective and sustained therapeutic benefit of such Treg adoptive transfer. It is believed that the use of immunosuppressive Treg selected to respond antigen-specifically to disease-associated autoantigens would lead to a safer, more effective adoptive transfer strategy than simple transfer of polyspecific Treg. In this respect, following infusion into a subject, the autoantigen-specific Treg cells would be expected to home specifically to tissue sites where autoimmune activity is manifest and, importantly, would mediate immune suppression specifically in response to the autoantigens that drive autoimmune disease pathogenesis. In support of this concept, studies in mice have shown that antigen-specific Tregs are more efficacious than polyclonal Tregs in murine models of autoimmune disease. (Duggleby et al., 2018 Front. Immunol. 9:252; Tang et al 2004 J Exp Med. 199(11):1455-1465; Tarbell et al 2004 J Exp Med 199:1467-1477.)

[0006] Therapeutic applications of adoptively transferred antigen-specific Treg or even of polyclonal Treg to treat autoimmune disease have, however, been limited, inter alia, by difficulties encountered in the course of isolating sufficient quantities of rare, antigen-specific Treg cells from a natural source, such as blood, and lymph, and by the overall scarcity of natural Treg in the peripheral blood, for example, approximately 14% of peripheral blood mononuclear cells include natural Treg. Development of Treg adoptive transfer therapies has also been hindered by challenges associated with expanding Treg populations to therapeutic numbers ex vivo while maintaining their immunosuppressive function, with the poor ability of adoptively transferred Treg cells to persist in an adoptive host and to proliferate after re-infusion. Also problematic has been Treg plasticity, such as conversion from immunosuppressive negative regulator of immunity to pro-inflammatory effector-like phenotype, in inflammatory settings in vivo. (Singer et al., 2014 Front. Immunol. 5:Art. 46; Trzonkowski et al., 2015 Sci. Translat. Med. 7(304):ps18 Romano et al., 2016 Transplant. Internatl. 30:745, McGovern et al., 2017 Front. Immunol. 8:Art. 1517).

[0007] No prior approaches provide bulk populations of stable Treg cells with suppressive activity having a desired antigen specificity, such as specificity for an antigen involved in the pathogenesis of a condition where antigen-specific immunosuppression would be beneficial, for instance, autoimmune disease, allergy, and/or other inflammatory conditions.

[0008] Accordingly, there remains a need for stable, antigen-specific immunoregulatory cells that maintain antigen-specific immunosuppressive capability in vitro and in vivo without exhibiting plasticity, as may be usefully administered to subjects in need of antigen-specific immunosuppression by adoptive transfer immunotherapy.

### SUMMARY OF THE INVENTION

[0009] Some embodiments include a gene editing chemical-inducible signaling complex (CISC) system comprising: a first polynucleotide encoding a first promoter and a nucleic acid encoding a first CISC component comprising a first extracellular binding domain, a transmembrane domain, and a first signaling domain, wherein the first promoter is proximal to the nucleic acid encoding a first CISC component; and a second polynucleotide encoding a second promoter and a nucleic acid encoding a second CISC component comprising a second extracellular binding domain, a transmembrane domain, and a second signaling domain; wherein the first CISC component and the second CISC component are configured such that when expressed in a cell, they are capable of dimerizing in the presence of rapamycin or a rapalog to generate a signaling-competent CISC. In some embodiments, a second promoter is proximal to the nucleic acid encoding a second CISC component.

[0010] In some embodiments, a 3′ end of the first promoter is within 500 consecutive nucleotides from a 5′ end of the nucleic acid encoding a first CISC component. In some embodiments, a 3′ end of the first promoter is within 100 consecutive nucleotides from a 5′ end of the nucleic acid encoding a first CISC component.

[0011] In some embodiments, the first polynucleotide is configured for integration into a first target locus of a genome, and the second polynucleotide is configured for integration into a second target locus of the genome. In some embodiments, the first target locus is selected from a TRAC locus or a FOXP3 locus; and the second target locus is selected from a TRAC locus or a FOXP3 locus.

[0012] In some embodiments, the first extracellular binding domain comprises an FK506 binding protein (FKBP)-rapamycin binding (FRB) domain; and the second extracellular binding domain comprises an FKBP domain.

[0013] In some embodiments, the first signaling domain comprises an IL-2 receptor subunit beta (IL2Rβ) domain or functional derivative thereof; and the second signaling domain comprises an IL-2 receptor subunit gamma (IL2Rβγ) domain or functional derivative thereof. In some embodiments, the IL2Rβ domain comprises a truncated IL2Rβ domain.

[0014] In some embodiments, the first and/or second promoter comprises a constitutive promoter. In some embodiments, the first and/or second promoter comprises a MND promoter.

[0015] In some embodiments, a first vector comprises the first polynucleotide, and a second vector comprises the second polynucleotide. In some embodiments, the first vector and/or the second vector comprises a viral vector. In some embodiments, the first vector and/or the second vector comprises a lentiviral, an adenoviral, or an adeno-associated viral (AAV) vector.

[0016] In some embodiments, the first polynucleotide and/or the second polynucleotide comprises a nucleic acid encoding a naked FRB domain, wherein the nucleic acid encoding a naked FRB domain lacks a nucleic acid encoding an endoplasmic reticulum localization signal polypeptide.

[0017] In some embodiments, the first polynucleotide and/or the second polynucleotide comprises a nucleic acid encoding a payload. In some embodiments, the first polynucleotide and/or the second polynucleotide comprises a nucleic acid encoding a self-cleaving polypeptide, wherein the nucleic acid encoding a self-cleaving polypeptide is 5′ of the nucleic acid encoding a payload. In some embodiments, the self-cleaving polypeptide is selected from the group consisting of P2A, T2A, E2A, and F2A. In some embodiments, payload comprises a T cell receptor (TCR), chimeric antigen receptor (CAR), or functional fragment thereof. In some embodiments, the TCR or functional fragment thereof comprises the polypeptide sequence of any one of SEQ ID NOs 1377-1390.

[0018] In some embodiments, the first polynucleotide and/or the second polynucleotide is configured for integration into a target genomic locus by homology directed repair (HDR) or by non-homologous end joining (NHEJ).

[0019] Some embodiments also include a guide RNA (gRNA) and a DNA endonuclease. In some embodiments, the DNA endonuclease comprises a Cas9 endonuclease.

[0020] In some embodiments, the rapalog is selected from the group consisting of everolimus, CCI-779, C20-methallylrapamycin, C16-(S)-3-methylindolerapamycin, C16-iRap, C16-(S)-7-methylindolerapamycin, AP21967, C16-(S)Butylsulfonamidorapamycin, AP23050, sodium mycophenolic acid, benidipine hydrochloride, AP1903, and AP23573, and a metabolite or derivative thereof.

[0021] Some embodiments include a cell comprising any one of the foregoing systems or systems described herein. In some embodiments, provided herein is a cell (e.g., a human cell) in which the endogenous TCR-encoding locus (e.g., TRAC gene/locus) has been edited. In some embodiments, a TRAC gene in a cell is edited by promoter capture (e.g., the method depicted in FIGS. 54, 68, and 70). In some embodiments, a TRAC gene in a cell is edited by knocking in a full TCR (e.g., an islet TCR) with a promoter (e.g., MND promoter). See FIG. 67 as an example of such a method. In some embodiments, a TRAC gene in a cell is edited by hijacking the TRAC gene with a promoter (e.g., MND promoter) as shown in FIG. 164. In some embodiments, a cell as provided herein is a human cell. In some embodiments, a cell is a lymphocyte (e.g., a NK1.1+, CD3+, CD4+ or CD8+ cell). In some embodiments, the cell is a T cell, a precursor T cell, or a hematopoietic stem cell. In some embodiments, the cell is an NK-T cell (e.g., a FOXP3− NK-T cell or a FOXP3+ NK-T cell). In some embodiments, the cell is a regulatory B (Breg) cell (e.g., a FOXP3− B cell or a FOXP3+ B cell). In some embodiments, the cell is a CD4+ T cell (e.g., a FOXP3−CD4+ or a FOXP3+CD4+ T cell) or a CD8+ T cell (e.g., a FOXP3−CD8+ or a FOXP3+CD8+ T cell). In some embodiments, the cell is a CD25− T cell. In some embodiments, the cell is a regulatory T (Treg) cell. Non-limiting examples of Treg cells are Tr1, Th3, CD8+CD28−, and Qa-1 restricted T cells. In some embodiments, the cell is a T regulatory type 1 (Tr1) cell. In some embodiments, the Treg cell is a FOXP3+ Treg cell. In some embodiments, the Treg cell expresses CTLA-4, LAG-3, CD25, CD39, neuropilin-1, galectin-1, and/or IL-2Ra on its surface. In some embodiments, a cell as provided herein is an engineered cell. In some embodiments, an engineered cell is a cell in which one or more genes/loci are manipulated or edited (e.g., to stabilize expression of one or more genes). In some embodiments, an engineered cell comprises editing of the Foxp3 gene/locus, e.g., by inserting a promoter (in some embodiments, downstream of one or more regulatory elements like the TSDR, and/or upstream from the first coding exon or first codon). In some embodiments, the cell is ex vivo. In some embodiments, a cell is in vivo. In some embodiments, the cell is a human cell. In some embodiments, a cell as described here in is isolated from a biological sample. A biological sample may be a sample from a subject (e.g., a human subject) or a composition produced in a lab (e.g., a culture of cells). A biological sample obtained from a subject make be a liquid sample (e.g., blood or a fraction thereof, a bronchial lavage, cerebrospinal fluid, or urine), or a solid sample (e.g., a piece of tissue). In some embodiments, the cell is obtained from peripheral blood. In some embodiments, the cell is obtained from umbilical cord blood.

[0022] Some embodiments include a pharmaceutical composition comprising any one of the foregoing cells and a pharmaceutically acceptable excipient.

[0023] Some embodiments include a method of editing a cell, comprising obtaining any of the foregoing systems; introducing the first polynucleotide and the second polynucleotide into a cell to obtain a transduced cell; and culturing the transduced cell. Some embodiments also include contacting the transduced cell with the rapamycin or rapalog. In some embodiments, contacting of a cell with rapamycin or a rapalog is performed ex vivo, e.g., to select cells. In some embodiments, contacting of a cell with rapamycin or a rapalog is performed in vivo, e.g., to activate or maintain activity of a cell via the CISC machinery in the cell; thus resulting in a stable suppressive phenotype of function (e.g., by maintaining expression of I1-2, or STAT5) or by maintaining a high number of active suppressive cells (e.g., stabilizing a suppressive phenotype). In some embodiments, contacting the cell with rapamycin or a rapalog in vivo maintains the number of suppressive cells at 50% or more, 60% or more, 70% or more, 80% or more, or 90% or more of the number of suppressive cells that were administered. In some embodiments, contacting the cell with rapamycin or a rapalog in vivo maintains expression of one or more cytokines at a level that is 50% or more, 60% or more, 70% or more, 80% or more, or 90% or more of the level of cytokine expression level observed prior to administration. In some embodiments, cells comprising CISC machinery as described herein and rapamycin or a rapalog are administered to a subject simultaneously. In some embodiments, cells comprising CISC machinery as described herein and rapamycin or a rapalog are administered to a subject sequentially.

[0024] Some embodiments include a method of suppressing proliferation of a population of cells, comprising contacting the population of cells with a genetically modified Treg cell, such as a CD4+ or CD8+ Treg cell; wherein the population of cells comprise an endogenous T cell receptor (TCR) specific for a first epitope of an antigen, and wherein the Treg cell comprises an exogenous TCR specific for a second epitope of the antigen.

[0025] Some embodiments include a method of treating, ameliorating or inhibiting a disorder in a subject comprising: administering a genetically modified Treg cell, such as a CD4+ or CD8+ Treg cell, to the subject to suppress proliferation of a population of cells; wherein the population of cells comprise an endogenous T cell receptor (TCR) specific for a first epitope of an antigen, and wherein the Treg cell comprises an exogenous TCR specific for a second epitope of the antigen.

[0026] In some embodiments, the disorder comprises an autoimmune disorder. In some embodiments, the subject is mammalian. In some embodiments, the subject is human.

[0027] In some embodiments, the exogenous TCR has an increased avidity for the antigen compared to an additional TCR specific for the antigen.

[0028] In some embodiments, the exogenous TCR has a reduced avidity for the antigen compared to an additional TCR specific for the antigen.

[0029] In some embodiments, the population of cells comprises CD4+ CD25− T cells. In some embodiments, the population of cells comprises polyclonal T cells.

[0030] In some embodiments, the exogenous TCR is specific for a type I diabetes antigen. In some embodiments, the exogenous TCR is specific for a type I diabetes antigen selected from IGRP, GAD65, and PPI. In some embodiments, the exogenous TCR is selected from T1D2, T1D4, T1D5-1, T1D5-2, 4.13, GAD113, and PPI76. In some embodiments, the exogenous TCR comprises T1D5-2.

[0031] In some embodiments, the population of cells are contacted with the genetically modified Treg cell in the presence of an antigen presenting cell and the antigen.

[0032] In some embodiments, the Treg cell is obtained by introducing into a cell a vector comprising a nucleic acid encoding the exogenous TCR.

[0033] In some embodiments, the Treg cell is mammalian. In some embodiments, the Treg cell is human.

[0034] Some embodiments of the methods and compositions provided herein include an artificial cell (e.g., CD4+CD25+ antigen-specific immunoregulatory T (airT) cell, also referred to as an engineered regulatory-like T (EngTreg) or edited regulatory-like T (edTreg) cell), comprising: (a) an artificial modification of a forkhead box protein 3/winged helix transcription factor (FOXP3) gene, wherein the modified gene constitutively expresses a FOXP3 gene product at a FOXP3 expression level that is equal to or greater than the FOXP3 expression level of a naturally occurring regulatory T (Treg) cell; and (b) at least one transduced polynucleotide encoding an antigen-specific T cell receptor (TCR) polypeptide (e.g., in a TRAC locus/gene). FIGS. 33 and 54 provides an example of such a cell. FIGS. 54, 67-68, 70, and 164 provide examples methods by which a TCR polypeptide may be transduced.

[0035] In some embodiments there is provided an artificial CD4+CD25+ antigen-specific immunoregulatory T (airT) cell obtained by (i) artificial modification of a forkhead box protein 3/winged helix transcription factor (FOXP3) gene in a CD4+CD25⁻ T cell, wherein the artificial modification causes the airT cell to constitutively express a FOXP3 gene product at a FOXP3 expression level that is equal to or greater than the FOXP3 expression level of a naturally occurring regulatory T (Treg) cell; and (ii) insertion of at least one transduced polynucleotide encoding an antigen-specific T cell receptor (TCR) or chimeric antigen receptor (CAR) polypeptide. In some embodiments there is provided an artificial antigen-specific immunoregulatory T (airT) cell (e.g., CD4+ or CD8+) obtained by (i) artificial modification of a forkhead box protein 3/winged helix transcription factor (FOXP3) gene in a CD25⁻ T cell, wherein the artificial modification causes the airT cell to constitutively express a FOXP3 gene product at a FOXP3 expression level that is equal to or greater than the FOXP3 expression level of a naturally occurring regulatory T (Treg) cell; and (ii) insertion of at least one transduced polynucleotide encoding an antigen-specific T cell receptor (TCR) or chimeric antigen receptor (CAR) polypeptide.

[0036] In some embodiments, the FOXP3 gene is present in a FOXP3 gene locus comprising a regulatory element that is capable of regulating expression of FOXP3 in a naturally occurring Treg cell. In some embodiments the FOXP3 gene is present in a FOXP3 gene locus comprising an intronic regulatory T cell (Treg)-specific demethylation region (TSDR) having a plurality of cytosine-guanine (CG) dinucleotides, wherein each CG dinucleotide comprises a methylated cytosine (C) nucleotide at a nucleotide position that comprises a demethylated C nucleotide in a naturally occurring Treg cell. In some embodiments at least 80%, 85%, 90%, 95%, 96%, 97%, 98%, or 99% of the TSDR C nucleotides at nucleotide positions that comprise a demethylated C nucleotide in a naturally occurring Treg cell are methylated. In some embodiments the FOXP3 gene product is expressed at a level sufficient for the airT cell to maintain a CD4+CD25+ phenotype for at least 21 days in vitro. In some embodiments the FOXP3 gene product is expressed at a level sufficient for the airT cell to maintain a CD4+CD25+ phenotype for at least 60 days in vivo following adoptive transfer to an immunocompatible mammalian host in need of antigen-specific immunosuppression. In some embodiments the cell comprises a phenotype selected from one or more of: (i) HeliosLo, (ii) CD152+, (iii) CD127⁻, or (iv) ICOS+. In some embodiments the artificial modification comprises a knockout of a native FOXP3 gene locus in the cell.

[0037] In some embodiments the artificial modification comprises an inserted nucleic acid molecule comprising a heterologous promoter at a native FOXP3 gene locus of the cell, wherein the promoter is positioned in the FOXP3 gene such that it is capable of promoting transcription of an endogenous FOXP3-encoding nucleotide sequence of the FOXP3 gene locus. In some embodiments, the heterologous promoter is a constitutive promoter, which promotes transcription of an operably linked sequence (e.g., a FOXP3 gene) at a consistent rate. Constitutive promoters may be strong promoters, which promote transcription at a higher rate than an endogenous promoter, or weak promoters, which promote transcription at a lower rate than a strong or endogenous promoter. In some embodiments, the constitutive promoter is a strong promoter. In some embodiments, the constitute promoter is a weak promoter. In some embodiments, the strong promoter is an MND promoter. In some embodiments, the constitutive promoter is a PGK promoter, MND promoter, or EF-1a promoter. In some embodiments, the heterologous promoter is an inducible promoter. Inducible promoters promote transcription of an operably linked sequence in response to the presence of an activating signal, or the absence of a repressor signal. In some embodiments, the inducible promoter is inducible by a drug or steroid.

[0038] In some embodiments the inserted nucleic acid molecule further comprises a nucleic acid sequence encoding a first chemically inducible signaling complex (CISC) component capable of specifically binding to a CISC inducer molecule. In some embodiments the transduced polynucleotide encoding the TCR polypeptide further comprises a nucleic acid sequence encoding a second chemically inducible signaling complex (CISC) component that is different from the first CISC component and is capable of specifically binding to the CISC inducer molecule. In some embodiments the nucleic acid sequence encoding the first CISC component and the nucleic acid sequence encoding the second CISC component further comprises a nucleic acid sequence encoding a third CISC component that is different from the first and second CISC components and is capable of specifically binding to the CISC inducer molecule. In some embodiments, the third CISC component is soluble and does not comprise a transmembrane domain or an extracellular domain. In some embodiments, the soluble third CISC component does not comprise a secretory peptide and is localized in the cytoplasm of the cell. In some embodiments the nucleic acid molecule comprising the constitutively active promoter is inserted downstream of an intronic regulatory T cell (Treg)-specific demethylation region (TSDR) in the native FOXP3 gene locus. In some embodiments the constitutively active promoter is an MND promoter. In some embodiments the artificial modification comprises an inserted nucleic acid molecule comprising an exogenous FOXP3-encoding polynucleotide operably linked to a constitutively active promoter at a native FOXP3 gene locus of the cell. In some embodiments the inserted nucleic acid molecule comprising the exogenous FOXP3-encoding polynucleotide operably linked to the constitutively active promoter further comprises a nucleic acid sequence encoding a first chemically inducible signaling complex (CISC) component capable of specifically binding to a CISC inducer molecule. In some embodiments the transduced polynucleotide encoding a gene (e.g., a FOXP3 or TCR polypeptide) further comprises a nucleic acid sequence encoding a second chemically inducible signaling complex (CISC) component that is different from the first CISC component and is capable of specifically binding to the CISC inducer molecule. In some embodiments at least one of the nucleic acid sequence encoding the first CISC component and the nucleic acid sequence encoding the second CISC component further comprises a nucleic acid sequence encoding a third CISC component that is different from the first and second CISC components and is capable of specifically binding to the CISC inducer molecule. In some embodiments, the third CISC component is soluble and does not comprise a transmembrane domain or an extracellular domain. In some embodiments, the soluble third CISC component does not comprise a secretory peptide and is localized in the cytoplasm of the cell. FIGS. 33 and 54 depict an example.

[0039] In some embodiments the nucleic acid molecule comprising the exogenous FOXP3-encoding polynucleotide operably linked to the constitutively active promoter is inserted downstream of an intronic regulatory T cell (Treg)-specific demethylation region (TSDR) in the native FOXP3 gene locus. In some embodiments the constitutively active promoter is an MND promoter.

[0040] In some embodiments the artificial modification comprises an insertion of a nucleic acid molecule comprising an exogenous FOXP3-encoding polynucleotide operably linked to a constitutively active promoter at a chromosomal site other than a native FOXP3 gene locus of the cell. In some embodiments at least one native T cell receptor (TCR) gene locus of the airT cell is knocked out or inactivated and replaced with the at least one transduced polynucleotide encoding an antigen-specific T cell receptor (TCR) polypeptide. In some embodiments, a promoter capture method is used in which a native/naturally-occurring/endogenous promoter is relied upon for control of inserted TCR-encoding nucleic acid, which may be followed by nucleic acid encoding one or more CISC components as described herein (see e.g., FIGS. 54, 68, 70). In some embodiments such an endogenous promoter capture method comprises in-frame knock-in to TRAC exon 1 to drive expression of a TCR relying on endogenous TRAC promoter. In some embodiments, a TCR knock-in strategy is employed and comprises knock-in of a promoter and TCR-encoding nucleic acid, which may be followed by nucleic acid encoding one or more CISC components as described herein (see e.g., FIG. 67). In some embodiments, the native/naturally-occurring/endogenous TCR gene or fragments thereof are hijacked by insertion of a promoter upstream from the native/naturally-occurring/endogenous and optionally upstream from nucleic acid encoding one or more CISC components as described herein (see e.g., FIG. 164). The TRAC gene/locus may be, in some embodiments, be combined with insertion of a promoter downstream from the TSDR in the Foxp3 gene/locus.

[0041] In some embodiments, each inserted nucleic acid encodes either a first or second CISC component, such that cells comprising both inserted nucleic acids express both the first and second CISC components, while cells comprising only one inserted nucleic acid do not express both first and second CISC components. In such embodiments, cells comprising both inserted nucleic acids can be selected by providing a CISC inducer molecule, which promotes dimerization of the first and second CISC components, resulting in transduction of a proliferative signal. When such inserted nucleic acids comprise other genetic modifications, such as an exogenous TCR or CAR, or insertion of a heterologous promoter to drive expression of an endogenous FOXP3 gene independently of regulation by endogenous regulatory elements, cells comprising said genetic modifications can be selected on the basis of expression of both CISC components. Thus, a cell comprising a first inserted nucleic acid molecule encoding a first CISC component and a TCR or CAR, and a second inserted nucleic acid molecule encoding a second CISC component and comprising a heterologous promoter operably linked to an endogenous FOXP3 gene, can be selected by providing a CISC inducer molecule. Therefore, providing the CISC inducer molecule can select for airT cells with a desired antigen specificity and expressing FOXP3 independently of endogenous regulatory mechanisms, such as suppression by a methylated TSDR.

[0042] Any known method of gene editing may be used for insertion of nucleotide sequences or modification of genomic loci. Non-limiting gene editing methods include zinc finger nuclease (ZFN)-mediated gene editing, transcription activator-like effector nuclease (TALEN)-mediated gene editing, meganuclease-mediated gene editing, transposon-mediated gene editing, serine integrase-mediated gene editing, lentivirus-mediated gene editing, RNA-guided nuclease (RGN)-mediated gene editing, CRISPR/Cas-mediated gene editing, homologous recombination-mediated gene editing, and combinations thereof. ZFNs are restriction enzymes that are made by fusing a zinc finger DNA-binding domain to a DNA-cleavage domain. Thus, ZFNs bind to specific DNA sequences, based on their specificity, and cleave DNA following binding. TALENs are restriction enzymes that contain a TAL effector domain, which bind to specific DNA sequences and can be modified to recognize a desired DNA sequence, and a DNA cleavage domain of a FokI endonuclease. Thus, TALENs bind to specific DNA sequences, based on their specificity, and cleave DNA after binding to their target sequence. Meganucleases are targeted nucleases derived from homing endonucleases, such as I-CreI and I-SceI, that bind to specific DNA sequences, based on their specificity, and cleave DNA following binding. Transposons are chromosomal elements that are capable of undergoing transposition, in which they can be excised from one position on a chromosome and introduced at another position. Transposases mediate the integration of transposons into a chromosome. In transposon-mediated gene editing, a desired sequence is inserted into a transposon, and the transposon containing the desired sequence is introduced to a cell, along with transposase or a nucleic acid encoding the transposase. The action of transposase mediates insertion of the transposon containing the desired sequence into the chromosome. See, e.g., Ivics and Izsvák. Curr Gene Ther. 2006. 6(5):593-607. RNA-guided nucleases are nucleases that bind to a conserved nucleotide sequence on RNA guide, with the RNA guide having a targeting nucleotide sequence that is complementary to a target nucleotide sequence on a nucleic acid to be modified (e.g., a chromosome). The targeting nucleotide sequence thus directs the RNA-guided nuclease to a nucleic acid comprising the target sequence, and the RNA-guided nuclease cleaves DNA after the RNA guide binds to the target sequence. Non-limiting examples of RNA-guided nucleases include those provided in U.S. Pat. No. 11,162,114, which is incorporated by reference herein in its entirety. Other examples of RNA-guided nucleases include CRISPR-Cas-associated nucleases.

[0043] In some embodiments the at least one native TCR gene locus that is knocked out or inactivated is a native TCR alpha chain (TRAC) locus. In some embodiments the inserted nucleic acid molecule comprising the exogenous FOXP3-encoding polynucleotide operably linked to the constitutively active promoter further comprises a nucleic acid sequence encoding a first chemically inducible signaling complex (CISC) component capable of specifically binding to a CISC inducer molecule. In some embodiments the transduced polynucleotide encoding the TCR polypeptide further comprises a nucleic acid sequence encoding a second chemically inducible signaling complex (CISC) component that is different from the first CISC component and is capable of specifically binding to the CISC inducer molecule. In some embodiments at least one of the nucleic acid sequences encoding the first CISC component and the nucleic acid sequence encoding the second CISC component further comprises a nucleic acid sequence encoding a third CISC component that is different from the first and second CISC components and is capable of specifically binding to the CISC inducer molecule. In some embodiments, the third CISC component is soluble and does not comprise a transmembrane domain or an extracellular domain. In some embodiments, the soluble third CISC component does not comprise a secretory peptide and is localized in the cytoplasm of the cell. In some embodiments the constitutively active promoter is an MND promoter. In some embodiments the chromosomal site that is other than a native FOXP3 gene locus, and at which is inserted the nucleic acid molecule comprising the exogenous FOXP3-encoding polynucleotide operably linked to the constitutively active promoter, is within a T cell receptor alpha chain (TRAC) locus of the cell.

[0044] In some embodiments in the airT cell at least one native T cell receptor (TCR) gene locus is knocked out or inactivated and replaced with the at least one transduced polynucleotide encoding an antigen-specific T cell receptor (TCR) polypeptide. In some embodiments the at least one native TCR gene locus that is knocked out is a native TCR alpha chain (TRAC) locus.

[0045] In some embodiments there is provided an artificial CD4+CD25+ antigen-specific immunoregulatory T (airT) cell, comprising: (a) a transduced nucleic acid sequence encoding an exogenous forkhead box protein 3/winged helix transcription factor (FOXP3) gene product, wherein the cell constitutively expresses the FOXP3 gene product at a FOXP3 expression level that is equal to or greater than the FOXP3 expression level of a naturally occurring regulatory T (Treg) cell; and (b) at least one transduced polynucleotide encoding an exogenous antigen-specific T cell receptor (TCR) polypeptide; wherein the transduced nucleic acid sequence encoding the exogenous FOXP3 gene product further comprises a nucleic acid sequence encoding a first chemically inducible signaling complex (CISC) component capable of specifically binding to a CISC inducer molecule; and wherein the transduced nucleic acid sequence encoding the exogenous TCR gene product further comprises a nucleic acid sequence encoding a second chemically inducible signaling complex (CISC) component that is different from the first CISC component and is capable of specifically binding to the CISC inducer molecule.

[0046] In some embodiments there is provided an artificial CD4+CD25+ antigen-specific immunoregulatory T (airT) cell, comprising: (a) a native FOXP3 gene locus that has been knocked out or inactivated, and into which FOXP3 locus has been inserted, by homology-directed repair, either: (i) a nucleic acid molecule comprising a constitutively active promoter that is capable of promoting transcription of an endogenous FOXP3-encoding nucleotide sequence of the FOXP3 gene, or (ii) a nucleic acid molecule comprising a constitutively active promoter operably linked to a nucleotide sequence encoding an exogenous FOXP3 protein or a functional derivative thereof, and which constitutively expresses the FOXP3 gene product at a FOXP3 expression level that is equal to or greater than the FOXP3 expression level of a naturally occurring regulatory T (Treg) cell, wherein the inserted nucleic acid molecule encoding the constitutively active promoter or encoding the constitutively active promoter operably linked to the nucleotide sequence encoding exogenous FoxP3 protein or functional derivative thereof further comprises a nucleic acid sequence encoding a first chemically inducible signaling complex (CISC) component capable of specifically binding to a CISC inducer molecule; and (b) a native T-cell receptor alpha (TRAC) locus that has been knocked out and into which TRAC locus has been inserted, by homology-directed repair, at least one transduced polynucleotide encoding an exogenous antigen-specific T cell receptor (TCR) polypeptide, wherein the transduced nucleic acid sequence encoding the exogenous TCR polypeptide further comprises a nucleic acid sequence encoding a second chemically inducible signaling complex (CISC) component that is different from the first CISC component and is capable of specifically binding to the CISC inducer molecule. It is to be understood that methods described herein that comprise manipulation of CD4+ cells, can be applied to other types of cells (e.g., CD8+ cells). In some embodiments, the methods provided herein comprise editing CD3+ cells, thereby producing edited CD3+ cells, including CD4+ and CD8+ airT cells. In some embodiments, the methods comprise editing CD4+ T cells, thereby producing CD4+ airT cells. In some embodiments, the methods comprise editing CD8+ T cells, thereby producing CD8+ airT cells. In some embodiments, the methods comprise editing NK1.1+ T cells, thereby producing NK1.1+ airT cells. In some embodiments, the methods comprise editing CD34+ hematopoietic stem cells (HSCs). In some embodiments, the methods comprise editing induced pluripotent stem cells (iPSCs). Edited stem cells may be matured in vitro to produce airT cells, or administered to a subject to allow in vivo development into airT cells. Edited stem cells may be matured into CD3+ airT cells, CD4+ airT cells, CD8+ airT cells, NK1.1+ airT cells, or a combination thereof.

[0047] In some embodiments at least one of the nucleic acid sequences encoding the first CISC component and the nucleic acid sequence encoding the second CISC component further comprises a nucleic acid sequence encoding a third CISC component that is different from the first and second CISC components and is capable of specifically binding to the CISC inducer molecule. In some embodiments, the third CISC component is soluble and does not comprise a transmembrane domain or an extracellular domain. In some embodiments, the soluble third CISC component does not comprise a secretory peptide and is localized in the cytoplasm of the cell. In some embodiments, the nucleic acid sequence encoding the first CISC component comprises nucleic acid sequences with homology to a first locus in a genome of a cell, and the nucleic acid sequence encoding the second CISC component comprises nucleic acid sequences with homology to a second locus in the genome of the cell, with the first and second loci being different loci. In some embodiments, the first locus is a FOXP3 locus, a TRAC locus, an AAVS1 locus, or a ROSA26 locus; and the second locus is a FOXP3 locus, a TRAC locus, an AAVS1 locus, or a ROSA26 locus, where the second locus is different from the first locus. In some embodiments, the first and second loci are the same locus (e.g., upstream or downstream from each other in the same gene locus), wherein the first and second loci are selected from the group consisting of a FOXP3 locus, a TRAC locus, a an AAVS1 locus, and a ROSA26 locus. In some embodiments, nucleic acids comprising nucleotide sequences encoding the first or second CISC components, and optionally a third CISC component are provided. In some embodiments, one or more nucleic acids comprised in a vector are provided. In some embodiments, cells comprising one or more of the nucleic acids, vectors, or a genome modified by insertion of a vector or nucleic acid are provided herein. In some embodiments, compositions comprising nucleic acids, vectors, or genetically modified cells are provided.

[0048] In some embodiments, a first polynucleotide encoding a first CISC component is inserted in first locus (e.g., Foxp3 locus) and a second polynucleotide encoding a second CISC component is inserted in second locus (e.g., TRAC locus). In some embodiments, a first polynucleotide is comprised on a first nucleic acid vector and a second polynucleotide is comprised on a second nucleic acid vector. In some embodiments, a first polynucleotide and second polynucleotide are comprised on the same nucleic acid vector. In some embodiments, a first polynucleotide further comprises one or more regulatory elements (e.g., a heterologous promoter such as MND) and/or a payload (e.g., a nucleic acid encoding a FOXP3 polypeptide). In some embodiments, a second polynucleotide further comprises one or more regulatory elements (e.g., a heterologous promoter such as MND) and/or a payload (e.g., a nucleic acid encoding a TCR or CAR). In some embodiments, a first CISC component to be encoded from a first locus comprises an extracellular domain comprising FKBP or functional fragment thereof, and a second CISC component to be encoded from a first locus comprises an extracellular domain comprising FRB or functional fragment thereof). In some embodiments, a first CISC component to be encoded from a first locus comprises an extracellular domain comprising FRB or functional fragment thereof, and a second CISC component to be encoded from a first locus comprises an extracellular domain comprising FKBP or functional fragment thereof. In some embodiments, a CISC component with an extracellular domain comprising FKBP or a functional fragment thereof also comprises an IL-2RB intracellular signaling domain or a functional fragment thereof. In some embodiments, a CISC component with an extracellular domain comprising FKBP or a functional fragment thereof also comprises an IL-2RG intracellular signaling domain or a functional fragment thereof. In some embodiments, a CISC component with an extracellular domain comprising FRB or a functional fragment thereof also comprises an IL-2RB intracellular signaling domain or a functional fragment thereof. In some embodiments, a CISC component with an extracellular domain comprising FRB or a functional fragment thereof also comprises an IL-2RB intracellular signaling domain or a functional fragment thereof. In some embodiments, a first or second polynucleotide further comprises a nucleic acid encoding a third CISC component that comprises FRB or functional fragment thereof and does not comprise an extracellular or transmembrane domain. A functional fragment of FKBP or FRB is one that can bind to rapamycin or rapalog.

[0049] In some embodiments the airT cell comprises at least a first and a second transduced polynucleotide each encoding an antigen-specific TCR polypeptide, wherein said first transduced polynucleotide encodes a TCR V-alpha polypeptide and said second transduced polynucleotide encodes a TCR V-beta polypeptide, wherein said V-alpha polypeptide and said V-beta polypeptide comprise a functional TCR capable of specific antigen recognition. In some embodiments the airT cell expresses an antigen-specific T cell receptor (TCR) comprising the antigen-specific TCR polypeptide encoded by the at least one transduced polynucleotide encoding said TCR polypeptide and which is capable of antigen-specifically induced immunosuppression in response to HLA-restricted stimulation by an antigen that is specifically recognized by said TCR polypeptide. In some embodiments the antigen-specifically induced immunosuppression comprises one or more of: (i) inhibition of either or both of activation and proliferation of effector T cells that recognize the antigen that is specifically recognized by the airT TCR comprising the TCR polypeptide that is encoded by the at least one transduced polynucleotide, (ii) inhibition of expression of inflammatory cytokines or inflammatory mediators by effector T cells that recognize the antigen that is specifically recognized by the airT TCR comprising the TCR polypeptide that is encoded by the at least one transduced polynucleotide (iii) elaboration of one or more immunosuppressive cytokines, perforin/granzyme, or anti-inflammatory products by the airT cell or induction in the airT cell of at least one of indoleamine 2,3-dioxygenase (IDO), competition for IL2 or adenosine, catabolism of tryptophan, and expression of inhibitory receptors, and (iv) inhibition of either or both of activation and proliferation of effector T cells that do not recognize the antigen that is specifically recognized by the airT TCR comprising the TCR polypeptide that is encoded by the at least one transduced polynucleotide.

[0050] In some embodiments the TCR specifically recognizes an antigen associated with pathogenesis of an autoimmune condition, an allergic condition, or an inflammatory condition. In some embodiments the TCR specifically recognizes an antigen associated with pathogenesis of an autoimmune disease (e.g., diabetes such as type-1 diabetes, primary biliary cholangitis), autoinflammatory disease (e.g., ARDS, stroke, and atherosclerotic cardiovascular disease), alloimmune disease (e.g., graft-versus-host disease, sold organ transplant, and immune mediated recurrent pregnancy loss), and/or allergic disease (e.g., asthma, drug hypersensitivity, and celiac disease). In some embodiments, a condition to be treated is a cancer. Wang et al. (J Intern Med. 2015 October;278(4):369-95) provide a review of autoimmune diseases, which review is incorporated herein by reference. In some embodiments (i) the autoimmune condition is selected from type 1 diabetes mellitus, multiple sclerosis, systemic lupus erythematosus, myasthenia gravis, rheumatoid arthritis, early onset rheumatoid arthritis, ankylosing spondylitis, immune-mediated pregnancy loss, immune-mediated recurrent pregnancy loss, dermatomyositis, psoriatic arthritis, Crohn's disease, inflammatory bowel disease (IBD), ulcerative colitis, bullous pemphigoid, pemphigus vulgaris, autoimmune hepatitis, psoriasis, Sjogren's syndrome, or celiac disease; (ii) the allergic condition is selected from allergic asthma, atopic dermatitis, pollen allergy, food allergy, drug hypersensitivity, or contact dermatitis; and (iii) the inflammatory condition is selected from pancreatic islet cell transplantation, asthma, steroid-resistant asthma, hepatitis, traumatic brain injury, primary sclerosing cholangitis, primary biliary cholangitis, polymyositis, stroke, Still's disease, acute respiratory distress syndrome, uveitis, inflammatory bowel disease (IBD), ulcerative colitis, graft-versus-host disease (GVHD), tolerance induction for transplantation, transplant rejection, or sepsis. In some embodiments, the inflammatory condition is primary biliary cholangitis. In some embodiments, the inflammatory condition is primary sclerosing cholangitis. In some embodiments, the inflammatory condition is autoimmune hepatitis. In some embodiments, the autoimmune condition is type 1 diabetes. In some embodiments, the inflammatory condition is islet cell transplantation. In some embodiments, the inflammatory condition is transplant rejection. In some embodiments, the autoimmune condition is multiple sclerosis. In some embodiments, the inflammatory condition is inflammatory bowel disease. In some embodiments, the inflammatory condition is acute respiratory distress syndrome. In some embodiments, the inflammatory condition is stroke. In some embodiments, the inflammatory condition is graft-versus-host disease. In some embodiments (i) the antigen associated with pathogenesis of the autoimmune condition is selected from an autoantigen set forth in any one or more of FIGS. 141-144, (ii) the antigen associated with pathogenesis of the allergic condition is selected from an allergenic antigen set forth in any one or more of FIGS. 141-144, and (iii) the antigen associated with pathogenesis of the inflammatory condition is selected from an inflammation-associated antigen set forth in any one or more of FIGS. 141-144.

[0051] In some embodiments the airT cell comprises at least one transduced polynucleotide sequence encoding a TCR polypeptide that specifically binds in a human HLA-restricted manner to an antigenic polypeptide epitope of no more than 35, 34, 33, 32, 31, 30, 29, 28, 27, 26, 25, 24, 23, 22, 21, 20, 19, 18, 17, 16, 15, 14, 13, 12, 11, 10, 9, 8, or 7 consecutive amino acids of an amino acid sequence selected from any one of the antigenic polypeptide sequences set forth in any one or more of FIGS. 141-144, or that is encoded by a nucleotide sequence set forth in any one or more of FIG. 139A or 140A. In some embodiments the airT cell comprises at least a first and a second transduced polynucleotide sequence encoding, respectively, a TCR V-alpha polypeptide and a TCR V-beta polypeptide of a TCR that specifically binds in a human HLA-restricted manner to an antigenic polypeptide epitope of no more than 35, 34, 33, 32, 31, 30, 29, 28, 27, 26, 25, 24, 23, 22, 21, 20, 19, 18, 17, 16, 15, 14, 13, 12, 11, 10, 9, 8, or 7 consecutive amino acids of an amino acid sequence selected from any one of the antigenic polypeptide sequences set forth in any one or more of FIGS. 141-144, or that comprises any one TCR-alpha polypeptide sequence set forth in any one or more of FIGS. 136-140 or encoded by a nucleotide sequence set forth in any one or more of FIGS. 139-140. In some embodiments the airT cell comprises at least a first and a second transduced polynucleotide sequence encoding, respectively, a TCR V-alpha polypeptide and a TCR V-beta polypeptide of a TCR that specifically binds in a human HLA-restricted manner to an antigenic polypeptide, wherein the TCR V-alpha and V-beta polypeptides comprise paired sequences selected from any one paired TCR V-alpha and V-beta polypeptide sequences set forth in FIG. 143.

[0052] In some embodiments the cell exhibits an induced level of Treg biological activity that is increased in response to MHC-restricted stimulation of the airT cell by an antigen recognized by the TCR polypeptide encoded by the at least one transduced polynucleotide, relative to a control level of Treg biological activity that is exhibited by the airT cell without MHC-restricted stimulation by the antigen, wherein the Treg biological activity comprises one or more of: (i) inhibition of either or both of activation and proliferation of effector T cells that recognize the antigen that is specifically recognized by the airT TCR comprising the TCR polypeptide that is encoded by the at least one transduced polynucleotide, (ii) inhibition of expression of inflammatory cytokines or inflammatory mediators by effector T cells that recognize the antigen that is specifically recognized by the airT TCR comprising the TCR polypeptide that is encoded by the at least one transduced polynucleotide (iii) elaboration of one or more immunosuppressive cytokines, perforin/granzyme, or anti-inflammatory products by the airT cell or induction in the airT cell of at least one of indoleamine 2,3-dioxygenase (IDO), competition for IL2 or adenosine, catabolism of tryptophan, expression of inhibitory receptors, or (iv) inhibition of either or both of activation and proliferation of effector T cells that do not recognize the antigen that is specifically recognized by the airT TCR comprising the TCR polypeptide that is encoded by the at least one transduced polynucleotide.

[0053] In some embodiments, (1) the antigen associated with pathogenesis of an autoimmune condition is IGRP(241-270) peptide, wherein the autoimmune condition is type 1 diabetes, and wherein the TCR is TCR T1D4 recognizing the IGRP(241-270) peptide in an HLA DRB1*0404-restricted manner; (2) the antigen associated with pathogenesis of an autoimmune condition is IGRP(305-324) peptide, wherein the autoimmune condition is type 1 diabetes, and wherein the TCR is TCR T1D5 recognizing the IGRP(305-324) peptide in an HLA DRB1*0404-restricted manner; or (3) the antigen associated with pathogenesis of an autoimmune condition is IGRP(305-324) peptide, wherein the autoimmune condition is type 1 diabetes, and wherein the TCR is TCR T1D2 recognizing the IGRP(305-324) peptide in an HLA DRB1*0404-restricted manner.

[0054] Some embodiments of the methods and compositions provided herein include any one of the foregoing airT cells or airT cells disclosed anywhere herein for use in the treatment, inhibition, or amelioration of an autoimmune, allergic, or inflammatory condition, such as one selected from type 1 diabetes mellitus, multiple sclerosis, systemic lupus erythematosus, myasthenia gravis, rheumatoid arthritis, early onset rheumatoid arthritis, ankylosing spondylitis, immune-mediated pregnancy loss, immune-mediated recurrent pregnancy loss, dermatomyositis, psoriatic arthritis, Crohn's disease, inflammatory bowel disease (IBD), ulcerative colitis, bullous pemphigoid, pemphigus vulgaris, autoimmune hepatitis, psoriasis, Sjogren's syndrome, celiac disease, allergic asthma, atopic dermatitis, pollen allergy, food allergy, drug hypersensitivity, contact dermatitis, pancreatic islet cell transplantation, asthma, steroid-resistant asthma, hepatitis, traumatic brain injury, primary sclerosing cholangitis, primary biliary cholangitis, polymyositis, stroke, Still's disease, acute respiratory distress syndrome, uveitis, inflammatory bowel disease (IBD), ulcerative colitis, graft-versus-host disease (GvHD), tolerance induction for transplantation, transplant rejection, or sepsis. Some embodiments of the methods and compositions provided herein include any one of the foregoing airT cells or airT cells disclosed anywhere herein for use in the treatment, inhibition, or amelioration of an autoimmune disease (e.g., diabetes such as type-1 diabetes, primary biliary cholangitis), autoinflammatory disease (e.g., ARDS, stroke, and atherosclerotic cardiovascular disease), alloimmune disease (e.g., graft-versus-host disease, sold organ transplant, and immune mediated recurrent pregnancy loss), and/or allergic disease (e.g., asthma, drug hypersensitivity, and celiac disease). In some embodiments, the inflammatory condition is primary biliary cholangitis. In some embodiments, the inflammatory condition is primary sclerosing cholangitis. In some embodiments, the inflammatory condition is autoimmune hepatitis. In some embodiments, the autoimmune condition is type 1 diabetes. In some embodiments, the inflammatory condition is islet cell transplantation. In some embodiments, the inflammatory condition is transplant rejection. In some embodiments, the autoimmune condition is multiple sclerosis. In some embodiments, the inflammatory condition is inflammatory bowel disease. In some embodiments, the inflammatory condition is acute respiratory distress syndrome. In some embodiments, the inflammatory condition is stroke. In some embodiments, the inflammatory condition is graft-versus-host disease. In some embodiments, a condition to be treated is a cancer. Wang et al. (J Intern Med. 2015 October;278(4):369-95) provide a review of autoimmune diseases, which review is incorporated herein by reference. In some embodiments, the TCR polypeptide binds to an antigen associated with a disorder selected from type 1 diabetes mellitus, multiple sclerosis, myocarditis, rheumatoid arthritis (RA), or systemic lupus erythematosus (SLE).

[0055] In some embodiments, the antigen is selected from the group consisting of vimentin, aggrecan, cartilage intermediate layer protein (CILP), preproinsulin, islet-specific glucose-6-phosphatase catalytic subunit-related protein (IGRP), and enolase.

[0056] In some embodiments, the antigen comprises an epitope selected from the group consisting of Enol326, CILP297-1, Vim418, Agg520, and SLE3.

[0057] In some embodiments, the antigen comprises an epitope having the amino acid sequence of any one of SEQ ID NOs 1363-1376 and 1408-1415.

[0058] In some embodiments, the TCR polypeptide comprises: a CD3 alpha polypeptide having the amino acid sequence of any one of SEQ ID NOs 1377-1390; and/or a CD3 beta polypeptide having the amino acid sequence of any one of SEQ ID NOs 1377-1390.

[0059] Some embodiments of the methods and compositions provided herein include a pharmaceutical composition comprising any one of the foregoing airT cells and a pharmaceutically acceptable excipient.

[0060] Some embodiments of the methods and compositions provided herein include use of any one of the foregoing airT cells as a medicament.

[0061] In some embodiments there is provided a method of producing an artificial antigen-specific immunoregulatory T (airT) cell, comprising: (a) introducing into a CD4+ T cell (1) a FOXP3 guide RNA (gRNA) comprising a spacer sequence complementary to a sequence within a native forkhead box protein 3/winged helix transcription factor (FOXP3) gene in the cell, or a nucleic acid encoding the FOXP3 gRNA; (2) a DNA endonuclease capable of forming a complex with the FOXP3 gRNA of (1), or a nucleic acid encoding the DNA endonuclease; and (3) a FOXP3 locus donor template selected from (i) a nucleic acid molecule comprising a constitutively active promoter capable of promoting transcription of an endogenous FOXP3-encoding nucleotide sequence of the FOXP3 gene; and (ii) a nucleic acid molecule comprising a constitutively active promoter operably linked to a nucleotide sequence encoding a FOXP3 protein or a functional derivative thereof, under conditions and for a time sufficient for knock-out or inactivation of the native FOXP3 gene locus in the cell and insertion of all or a portion of the FOXP3 locus donor template nucleic acid (e.g., by HDR or NHEJ); and (b) simultaneously or sequentially and in any order with (a), transducing the CD4+ T cell with at least one polynucleotide encoding an antigen-specific T cell receptor (TCR) polypeptide. In some embodiments step (b) is selected from: (i) transducing the CD4+ T cell with at least one vector comprising the polynucleotide encoding the antigen-specific T cell receptor (TCR) or chimeric antigen receptor (CAR) polypeptide, and (ii) introducing into the CD4+ T cell (1) a T cell receptor alpha (TRAC) guide RNA (gRNA) comprising a spacer sequence complementary to a sequence within a native TRAC gene locus in the cell, or a nucleic acid encoding the TRAC gRNA; (2) a DNA endonuclease capable of forming a complex with the TRAC gRNA of (1), or a nucleic acid encoding the DNA endonuclease; and (3) a TRAC locus donor template comprising the at least one polynucleotide encoding the antigen-specific T cell receptor (TCR) or chimeric antigen receptor (CAR) polypeptide, under conditions and for a time sufficient for knock-out or inactivation of the native TRAC gene locus in the cell and insertion of all or a portion of the TRAC locus donor template nucleic acid (e.g., by HDR or NHEJ). In some embodiments, the FOXP3 locus donor template comprises a polynucleotide/nucleic acid encoding a first CISC component, and the TRAC locus donor template comprises a polynucleotide/nucleic acid encoding a second CISC component that is complementary to the first CISC component, wherein each of the first and second CISC components are capable of specifically binding to a CISC inducer molecule, and wherein the first and second CISC components dimerize in the presence of the CISC inducer molecule. In other embodiments, the FOXP3 locus donor template encodes a second CISC component, and the TRAC locus donor template encodes a first CISC component, where both CISC components are capable of specifically binding to a CISC inducer molecule such that they dimerize in the presence of the CISC inducer molecule. The first and second CISC components encoded by the respective donor templates may be any of the first and second CISC components provided herein. In some embodiments, the FOXP3 locus donor template and/or the TRAC locus donor template comprises a polynucleotide/nucleic acid encoding a third CISC component that is soluble, cytosolic, and capable of specifically binding to the CISC inducer molecule. Any method for gene editing is contemplated herein, including, without limitation, viral and non-viral approaches that enable targeted gene-editing (e.g., Cas9, ZFN, TALEN). Accordingly, a method of gene editing as provided herein may make use of a nuclease to target a locus or a targeted locus on a nucleic acid sequence. In some embodiments, a nuclease is an RNA-guided nuclease (e.g., a CRISPR/Cas nuclease), a meganuclease, a zinc-finger nuclease, or TALEN. [0057] In some embodiments there is provided a method of producing an artificial antigen-specific immunoregulatory T (airT) cell, comprising: (a) introducing into a CD4+ T cell (1) a first T cell receptor alpha (TRAC) guide RNA (gRNA) comprising a first spacer sequence complementary to a first sequence within a native TRAC gene locus in the cell, or a nucleic acid encoding the first TRAC gRNA; (2) a first DNA endonuclease capable of forming a complex with the first TRAC gRNA of (1), or a nucleic acid encoding the first DNA endonuclease; and (3) a first TRAC locus donor template selected from (i) a nucleic acid molecule comprising a nucleotide sequence encoding a FOXP3 protein or a functional derivative thereof, and (ii) a nucleic acid molecule comprising a constitutively active promoter operably linked to a nucleotide sequence encoding a FOXP3 protein or a functional derivative thereof, under conditions and for a time sufficient for knock-out of the native TRAC gene locus in the cell and insertion of all or a portion of the first TRAC locus donor template nucleic acid (e.g., by HDR or NHEJ); and (b) simultaneously or sequentially and in any order with (a), introducing into the CD4+ T cell (1) a second T cell receptor alpha (TRAC) guide RNA (gRNA) comprising a second spacer sequence complementary to a second sequence within a TRAC gene, or a nucleic acid encoding the second TRAC gRNA, wherein the second spacer sequence is not identical to the first spacer sequence; (2) a second DNA endonuclease capable of forming a complex with the second TRAC gRNA of (1), or a nucleic acid encoding the second DNA endonuclease, wherein the second DNA endonuclease is selected from a DNA endonuclease that is identical to the first DNA endonuclease and a DNA endonuclease that is not identical to the first DNA endonuclease; and (3) a second TRAC locus donor template comprising the at least one polynucleotide encoding the antigen-specific T cell receptor (TCR) polypeptide, under conditions and for a time sufficient for knock-out or inactivation of the native TRAC gene locus in the cell and insertion of all or a portion of the second TRAC locus donor template nucleic acid (e.g., by HDR or NHEJ). In some embodiments, the FOXP3 locus donor template comprises a polynucleotide/nucleic acid encoding a first CISC component, and the TRAC locus donor template comprises a polynucleotide/nucleic acid encoding a second CISC component that is complementary to the first CISC component, wherein each of the first and second CISC components are capable of specifically binding to a CISC inducer molecule, and wherein the first and second CISC components dimerize in the presence of the CISC inducer molecule. In other embodiments, the FOXP3 locus donor template encodes a second CISC component, and the TRAC locus donor template encodes a first CISC component, where both CISC components are capable of specifically binding to a CISC inducer molecule such that they dimerize in the presence of the CISC inducer molecule. The first and second CISC components encoded by the respective donor templates may be any of the first and second CISC components provided herein. In some embodiments, the FOXP3 locus donor template and/or the TRAC locus donor template comprises a polynucleotide encoding a third CISC component that is soluble, cytosolic, and capable of specifically binding to the CISC inducer molecule. Any method for gene editing is contemplated herein, including, without limitation, viral and non-viral approaches that enable targeted gene-editing (e.g., Cas9, ZFN, TALEN). Accordingly, a method of gene editing as provided herein may make use of a nuclease to target a locus or a targeted locus on a nucleic acid sequence. In some embodiments, a nuclease is an RNA-guided nuclease (e.g., a CRISPR/Cas nuclease), a meganuclease, a zinc-finger nuclease, or TALEN.

[0062] In some embodiments there is provided a method of producing an artificial antigen-specific immunoregulatory T (airT) cell, comprising: introducing into a CD4+ T cell (1) a T cell receptor alpha (TRAC) guide RNA (gRNA) comprising a spacer sequence that is complementary to a sequence within a native TRAC gene locus in the cell, or a nucleic acid encoding the TRAC gRNA; (2) a DNA endonuclease that is capable of forming a complex with the TRAC gRNA of (1), or a nucleic acid encoding the DNA endonuclease; and (3) a TRAC locus donor template which comprises the at least one polynucleotide that encodes the antigen-specific T cell receptor (TCR) polypeptide, under conditions and for a time sufficient for knock-out or inactivation of the native TRAC gene locus in the cell and insertion of all or a portion of the TRAC locus donor template by homology-directed repair (HDR) or non-homologous end-joining (NHEJ). In some embodiments a first one of said insertion donor templates further comprises a nucleic acid sequence encoding a first chemically inducible signaling complex (CISC) component that is capable of specifically binding to a CISC inducer molecule, and a second one of said insertion donor templates further comprises a nucleic acid sequence encoding a second chemically inducible signaling complex (CISC) component that is different from the first CISC component and is capable of specifically binding to the CISC inducer molecule. In some embodiments the first insertion donor template comprises homology to a first locus (e.g., the Foxp3 or TRAC locus) in a genome of a cell, and the second insertion donor template comprises homology to a second locus (e.g., the Foxp3 or TRAC locus) in a genome of a cell, and optionally the first and second loci are different loci. The first and second loci can be any loci in a genome, e.g., other than Foxp3 or TRAC locus. In some embodiments at least one of the first and second insertion donor templates further comprises a nucleic acid sequence encoding a third CISC component that is different from the first and second CISC components and is capable of specifically binding to the CISC inducer molecule. In some embodiments of the methods provided herein: (a) the DNA endonuclease is selected from a an RNA-guided nuclease (RGN), CRISPR/Cas nuclease, a TALEN, a meganuclease, megaTAL, or a zinc finger nuclease, (b) the constitutively active promoter is MND, insertion is by a mechanism selected from homology-directed repair or non-homologous end joining, (d) the first and second CISC components comprise intracellular domains that are selected in a mutually exclusive manner from IL2RB or IL2RG, and comprise extracellular domains that are selected in a mutually exclusive manner from FKBP and FRB, (e) the third CISC component is FRB, which is encoded by either the first or second donor template, (f) the CISC inducer molecule is rapamycin or an analog thereof, and/or (g) the first and second donor template are inserted into two distinct loci, wherein each locus is selected independently from the group consisting of a FOXP3 locus, a TRAC locus, an AAVS1 locus, and a ROSA26 locus. Any method for gene editing is contemplated herein, including, without limitation, viral and non-viral approaches that enable targeted gene-editing (e.g., Cas9, ZFN, TALEN). Accordingly, a method of gene editing as provided herein may make use of a nuclease to target a locus or a targeted locus on a nucleic acid sequence. In some embodiments, a nuclease is Cas9, a zinc-finger nuclease or TALEN.

[0063] In some embodiments there is provided a method of producing an artificial antigen-specific immunoregulatory T (airT) cell, comprising: (a) introducing into a CD8+ T cell (1) a FOXP3 guide RNA (gRNA) comprising a spacer sequence complementary to a sequence within a native forkhead box protein 3/winged helix transcription factor (FOXP3) gene in the cell, or a nucleic acid encoding the FOXP3 gRNA; (2) a DNA endonuclease capable of forming a complex with the FOXP3 gRNA of (1), or a nucleic acid encoding the DNA endonuclease; and (3) a FOXP3 locus donor template selected from (i) a nucleic acid molecule comprising a constitutively active promoter capable of promoting transcription of an endogenous FOXP3-encoding nucleotide sequence of the FOXP3 gene; and (ii) a nucleic acid molecule comprising a constitutively active promoter operably linked to a nucleotide sequence encoding a FOXP3 protein or a functional derivative thereof, under conditions and for a time sufficient for knock-out or inactivation of the native FOXP3 gene locus in the cell and insertion of all or a portion of the FOXP3 locus donor template nucleic acid (e.g., by HDR or NHEJ); and (b) simultaneously or sequentially and in any order with (a), transducing the CD8+ T cell with at least one polynucleotide encoding an antigen-specific T cell receptor (TCR) polypeptide. In some embodiments step (b) is selected from: (i) transducing the CD8+ T cell with at least one vector comprising the polynucleotide encoding the antigen-specific T cell receptor (TCR) or chimeric antigen receptor (CAR) polypeptide, and (ii) introducing into the CD8+ T cell (1) a T cell receptor alpha (TRAC) guide RNA (gRNA) comprising a spacer sequence complementary to a sequence within a native TRAC gene locus in the cell, or a nucleic acid encoding the TRAC gRNA; (2) a DNA endonuclease capable of forming a complex with the TRAC gRNA of (1), or a nucleic acid encoding the DNA endonuclease; and (3) a TRAC locus donor template comprising the at least one polynucleotide/nucleic acid encoding the antigen-specific T cell receptor (TCR) or chimeric antigen receptor (CAR) polypeptide, under conditions and for a time sufficient for knock-out or inactivation of the native TRAC gene locus in the cell and insertion of all or a portion of the TRAC locus donor template nucleic acid (e.g., by HDR or NHEJ). In some embodiments, the FOXP3 locus donor template comprises a polynucleotide/nucleic acid encoding a first CISC component, and the TRAC locus donor template comprises a polynucleotide/nucleic acid encoding a second CISC component that is complementary to the first CISC component, wherein each of the first and second CISC components are capable of specifically binding to a CISC inducer molecule, and wherein the first and second CISC components dimerize in the presence of the CISC inducer molecule. In other embodiments, the FOXP3 locus donor template encodes a second CISC component, and the TRAC locus donor template encodes a first CISC component, where both CISC components are capable of specifically binding to a CISC inducer molecule such that they dimerize in the presence of the CISC inducer molecule. The first and second CISC components encoded by the respective donor templates may be any of the first and second CISC components provided herein. In some embodiments, the FOXP3 locus donor template and/or the TRAC locus donor template comprises a polynucleotide/nucleic acid encoding a third CISC component that is soluble, cytosolic, and capable of specifically binding to the CISC inducer molecule. Any method for gene editing is contemplated herein, including, without limitation, viral and non-viral approaches that enable targeted gene-editing (e.g., Cas9, ZFN, TALEN). Accordingly, a method of gene editing as provided herein may make use of a nuclease to target a locus or a targeted locus on a nucleic acid sequence. In some embodiments, a nuclease is an RNA-guided nuclease (e.g., a CRISPR/Cas nuclease), a meganuclease, a zinc-finger nuclease, or TALEN. [0057] In some embodiments there is provided a method of producing an artificial antigen-specific immunoregulatory T (airT) cell, comprising: (a) introducing into a CD8+ T cell (1) a first T cell receptor alpha (TRAC) guide RNA (gRNA) comprising a first spacer sequence complementary to a first sequence within a native TRAC gene locus in the cell, or a nucleic acid encoding the first TRAC gRNA; (2) a first DNA endonuclease capable of forming a complex with the first TRAC gRNA of (1), or a nucleic acid encoding the first DNA endonuclease; and (3) a first TRAC locus donor template selected from (i) a nucleic acid molecule comprising a nucleotide sequence encoding a FOXP3 protein or a functional derivative thereof, and (ii) a nucleic acid molecule comprising a constitutively active promoter operably linked to a nucleotide sequence encoding a FOXP3 protein or a functional derivative thereof, under conditions and for a time sufficient for knock-out of the native TRAC gene locus in the cell and insertion of all or a portion of the first TRAC locus donor template nucleic acid (e.g., by HDR or NHEJ); and (b) simultaneously or sequentially and in any order with (a), introducing into the CD8+ T cell (1) a second T cell receptor alpha (TRAC) guide RNA (gRNA) comprising a second spacer sequence complementary to a second sequence within a TRAC gene, or a nucleic acid encoding the second TRAC gRNA, wherein the second spacer sequence is not identical to the first spacer sequence; (2) a second DNA endonuclease capable of forming a complex with the second TRAC gRNA of (1), or a nucleic acid encoding the second DNA endonuclease, wherein the second DNA endonuclease is selected from a DNA endonuclease that is identical to the first DNA endonuclease and a DNA endonuclease that is not identical to the first DNA endonuclease; and (3) a second TRAC locus donor template comprising the at least one polynucleotide/nucleic acid encoding the antigen-specific T cell receptor (TCR) polypeptide, under conditions and for a time sufficient for knock-out or inactivation of the native TRAC gene locus in the cell and insertion of all or a portion of the second TRAC locus donor template nucleic acid (e.g., by HDR or NHEJ). In some embodiments, the FOXP3 locus donor template comprises a polynucleotide/nucleic acid encoding a first CISC component, and the TRAC locus donor template comprises a polynucleotide/nucleic acid encoding a second CISC component that is complementary to the first CISC component, wherein each of the first and second CISC components are capable of specifically binding to a CISC inducer molecule, and wherein the first and second CISC components dimerize in the presence of the CISC inducer molecule. In other embodiments, the FOXP3 locus donor template encodes a second CISC component, and the TRAC locus donor template encodes a first CISC component, where both CISC components are capable of specifically binding to a CISC inducer molecule such that they dimerize in the presence of the CISC inducer molecule. The first and second CISC components encoded by the respective donor templates may be any of the first and second CISC components provided herein. In some embodiments, the FOXP3 locus donor template and/or the TRAC locus donor template comprises a polynucleotide/nucleic acid encoding a third CISC component that is soluble, cytosolic, and capable of specifically binding to the CISC inducer molecule. Any method for gene editing is contemplated herein, including, without limitation, viral and non-viral approaches that enable targeted gene-editing (e.g., Cas9, ZFN, TALEN). Accordingly, a method of gene editing as provided herein may make use of a nuclease to target a locus or a targeted locus on a nucleic acid sequence. In some embodiments, a nuclease is an RNA-guided nuclease (e.g., a CRISPR/Cas nuclease), a meganuclease, a zinc-finger nuclease, or TALEN.

[0064] In some embodiments there is provided a method of producing an artificial antigen-specific immunoregulatory T (airT) cell, comprising: introducing into a CD8+ T cell (1) a T cell receptor alpha (TRAC) guide RNA (gRNA) comprising a spacer sequence that is complementary to a sequence within a native TRAC gene locus in the cell, or a nucleic acid encoding the TRAC gRNA; (2) a DNA endonuclease that is capable of forming a complex with the TRAC gRNA of (1), or a nucleic acid encoding the DNA endonuclease; and (3) a TRAC locus donor template which comprises the at least one polynucleotide/nucleic acid that encodes the antigen-specific T cell receptor (TCR) polypeptide, under conditions and for a time sufficient for knock-out or inactivation of the native TRAC gene locus in the cell and insertion of all or a portion of the TRAC locus donor template by homology-directed repair (HDR) or non-homologous end-joining (NHEJ). In some embodiments a first one of said insertion donor templates further comprises a nucleic acid sequence encoding a first chemically inducible signaling complex (CISC) component that is capable of specifically binding to a CISC inducer molecule, and a second one of said insertion donor templates further comprises a nucleic acid sequence encoding a second chemically inducible signaling complex (CISC) component that is different from the first CISC component and is capable of specifically binding to the CISC inducer molecule. In some embodiments the first insertion donor template comprises homology to a first locus (e.g., the Foxp3 or TRAC locus) in a genome of a cell, and the second insertion donor template comprises homology to a second locus (e.g., the Foxp3 or TRAC locus) in a genome of a cell, and optionally the first and second loci are different loci. In some embodiments at least one of the first and second insertion donor templates further comprises a nucleic acid sequence encoding a third CISC component that is different from the first and second CISC components and is capable of specifically binding to the CISC inducer molecule. In some embodiments of the methods provided herein: (a) the DNA endonuclease is selected from a an RNA-guided nuclease (RGN), CRISPR/Cas nuclease, a TALEN, a meganuclease, megaTAL, or a zinc finger nuclease, (b) the constitutively active promoter is MND, insertion is by a mechanism selected from homology-directed repair or non-homologous end joining, (d) the first and second CISC components comprise intracellular domains that are selected in a mutually exclusive manner from IL2RB or IL2RG, and comprise extracellular domains that are selected in a mutually exclusive manner from FKBP and FRB, (e) the third CISC component is FRB, which is encoded by either the first or second donor template, (f) the CISC inducer molecule is rapamycin or an analog thereof, and/or (g) the first and second donor template are inserted into two distinct loci, wherein each locus is selected independently from the group consisting of a FOXP3 locus, a TRAC locus, an AAVS1 locus, and a ROSA26 locus. Any method for gene editing is contemplated herein, including, without limitation, viral and non-viral approaches that enable targeted gene-editing (e.g., Cas9, ZFN, TALEN). Accordingly, a method of gene editing as provided herein may make use of a nuclease to target a locus or a targeted locus on a nucleic acid sequence. In some embodiments, a nuclease is Cas9, a zinc-finger nuclease or TALEN.

[0065] In some embodiments there is provided a method of producing an artificial antigen-specific immunoregulatory T (airT) cell, comprising: (a) introducing into a CD3+ T cell (1) a FOXP3 guide RNA (gRNA) comprising a spacer sequence complementary to a sequence within a native forkhead box protein 3/winged helix transcription factor (FOXP3) gene in the cell, or a nucleic acid encoding the FOXP3 gRNA; (2) a DNA endonuclease capable of forming a complex with the FOXP3 gRNA of (1), or a nucleic acid encoding the DNA endonuclease; and (3) a FOXP3 locus donor template selected from (i) a nucleic acid molecule comprising a constitutively active promoter capable of promoting transcription of an endogenous FOXP3-encoding nucleotide sequence of the FOXP3 gene; and (ii) a nucleic acid molecule comprising a constitutively active promoter operably linked to a nucleotide sequence encoding a FOXP3 protein or a functional derivative thereof, under conditions and for a time sufficient for knock-out or inactivation of the native FOXP3 gene locus in the cell and insertion of all or a portion of the FOXP3 locus donor template nucleic acid (e.g., by HDR or NHEJ); and (b) simultaneously or sequentially and in any order with (a), transducing the CD3+ T cell with at least one polynucleotide/nucleic acid encoding an antigen-specific T cell receptor (TCR) polypeptide. In some embodiments step (b) is selected from: (i) transducing the CD3+ T cell with at least one vector comprising the polynucleotide/nucleic acid encoding the antigen-specific T cell receptor (TCR) or chimeric antigen receptor (CAR) polypeptide, and (ii) introducing into the CD3+ T cell (1) a T cell receptor alpha (TRAC) guide RNA (gRNA) comprising a spacer sequence complementary to a sequence within a native TRAC gene locus in the cell, or a nucleic acid encoding the TRAC gRNA; (2) a DNA endonuclease capable of forming a complex with the TRAC gRNA of (1), or a nucleic acid encoding the DNA endonuclease; and (3) a TRAC locus donor template comprising the at least one polynucleotide/nucleic acid encoding the antigen-specific T cell receptor (TCR) or chimeric antigen receptor (CAR) polypeptide, under conditions and for a time sufficient for knock-out or inactivation of the native TRAC gene locus in the cell and insertion of all or a portion of the TRAC locus donor template nucleic acid (e.g., by HDR or NHEJ). In some embodiments, the FOXP3 locus donor template comprises a polynucleotide/nucleic acid encoding a first CISC component, and the TRAC locus donor template comprises a polynucleotide/nucleic acid encoding a second CISC component that is complementary to the first CISC component, wherein each of the first and second CISC components are capable of specifically binding to a CISC inducer molecule, and wherein the first and second CISC components dimerize in the presence of the CISC inducer molecule. In other embodiments, the FOXP3 locus donor template encodes a second CISC component, and the TRAC locus donor template encodes a first CISC component, where both CISC components are capable of specifically binding to a CISC inducer molecule such that they dimerize in the presence of the CISC inducer molecule. The first and second CISC components encoded by the respective donor templates may be any of the first and second CISC components provided herein. In some embodiments, the FOXP3 locus donor template and/or the TRAC locus donor template comprises a polynucleotide/nucleic acid encoding a third CISC component that is soluble, cytosolic, and capable of specifically binding to the CISC inducer molecule. Any method for gene editing is contemplated herein, including, without limitation, viral and non-viral approaches that enable targeted gene-editing (e.g., Cas9, ZFN, TALEN). Accordingly, a method of gene editing as provided herein may make use of a nuclease to target a locus or a targeted locus on a nucleic acid sequence. In some embodiments, a nuclease is an RNA-guided nuclease (e.g., a CRISPR/Cas nuclease), a meganuclease, a zinc-finger nuclease, or TALEN. [0057] In some embodiments there is provided a method of producing an artificial antigen-specific immunoregulatory T (airT) cell, comprising: (a) introducing into a CD3+ T cell (1) a first T cell receptor alpha (TRAC) guide RNA (gRNA) comprising a first spacer sequence complementary to a first sequence within a native TRAC gene locus in the cell, or a nucleic acid encoding the first TRAC gRNA; (2) a first DNA endonuclease capable of forming a complex with the first TRAC gRNA of (1), or a nucleic acid encoding the first DNA endonuclease; and (3) a first TRAC locus donor template selected from (i) a nucleic acid molecule comprising a nucleotide sequence encoding a FOXP3 protein or a functional derivative thereof, and (ii) a nucleic acid molecule comprising a constitutively active promoter operably linked to a nucleotide sequence encoding a FOXP3 protein or a functional derivative thereof, under conditions and for a time sufficient for knock-out of the native TRAC gene locus in the cell and insertion of all or a portion of the first TRAC locus donor template nucleic acid (e.g., by HDR or NHEJ); and (b) simultaneously or sequentially and in any order with (a), introducing into the CD3+ T cell (1) a second T cell receptor alpha (TRAC) guide RNA (gRNA) comprising a second spacer sequence complementary to a second sequence within a TRAC gene, or a nucleic acid encoding the second TRAC gRNA, wherein the second spacer sequence is not identical to the first spacer sequence; (2) a second DNA endonuclease capable of forming a complex with the second TRAC gRNA of (1), or a nucleic acid encoding the second DNA endonuclease, wherein the second DNA endonuclease is selected from a DNA endonuclease that is identical to the first DNA endonuclease and a DNA endonuclease that is not identical to the first DNA endonuclease; and (3) a second TRAC locus donor template comprising the at least one polynucleotide/nucleic acid encoding the antigen-specific T cell receptor (TCR) polypeptide, under conditions and for a time sufficient for knock-out or inactivation of the native TRAC gene locus in the cell and insertion of all or a portion of the second TRAC locus donor template nucleic acid (e.g., by HDR or NHEJ). In some embodiments, the FOXP3 locus donor template comprises a polynucleotide/nucleic acid encoding a first CISC component, and the TRAC locus donor template comprises a polynucleotide/nucleic acid encoding a second CISC component that is complementary to the first CISC component, wherein each of the first and second CISC components are capable of specifically binding to a CISC inducer molecule, and wherein the first and second CISC components dimerize in the presence of the CISC inducer molecule. In other embodiments, the FOXP3 locus donor template encodes a second CISC component, and the TRAC locus donor template encodes a first CISC component, where both CISC components are capable of specifically binding to a CISC inducer molecule such that they dimerize in the presence of the CISC inducer molecule. The first and second CISC components encoded by the respective donor templates may be any of the first and second CISC components provided herein. In some embodiments, the FOXP3 locus donor template and/or the TRAC locus donor template comprises a polynucleotide/nucleic acid encoding a third CISC component that is soluble, cytosolic, and capable of specifically binding to the CISC inducer molecule. Any method for gene editing is contemplated herein, including, without limitation, viral and non-viral approaches that enable targeted gene-editing (e.g., Cas9, ZFN, TALEN). Accordingly, a method of gene editing as provided herein may make use of a nuclease to target a locus or a targeted locus on a nucleic acid sequence. In some embodiments, a nuclease is an RNA-guided nuclease (e.g., a CRISPR/Cas nuclease), a meganuclease, a zinc-finger nuclease, or TALEN.

[0066] In some embodiments there is provided a method of producing an artificial antigen-specific immunoregulatory T (airT) cell, comprising: introducing into a CD3+ T cell (1) a T cell receptor alpha (TRAC) guide RNA (gRNA) comprising a spacer sequence that is complementary to a sequence within a native TRAC gene locus in the cell, or a nucleic acid encoding the TRAC gRNA; (2) a DNA endonuclease that is capable of forming a complex with the TRAC gRNA of (1), or a nucleic acid encoding the DNA endonuclease; and (3) a TRAC locus donor template which comprises the at least one polynucleotide/nucleic acid that encodes the antigen-specific T cell receptor (TCR) polypeptide, under conditions and for a time sufficient for knock-out or inactivation of the native TRAC gene locus in the cell and insertion of all or a portion of the TRAC locus donor template by homology-directed repair (HDR) or non-homologous end-joining (NHEJ). In some embodiments a first one of said insertion donor templates further comprises a nucleic acid sequence encoding a first chemically inducible signaling complex (CISC) component that is capable of specifically binding to a CISC inducer molecule, and a second one of said insertion donor templates further comprises a nucleic acid sequence encoding a second chemically inducible signaling complex (CISC) component that is different from the first CISC component and is capable of specifically binding to the CISC inducer molecule. In some embodiments the first insertion donor template comprises homology to a first locus (e.g., the Foxp3 or TRAC locus) in a genome of a cell, and the second insertion donor template comprises homology to a second locus (e.g., the Foxp3 or TRAC locus) in a genome of a cell, and optionally the first and second loci are different loci. In some embodiments at least one of the first and second insertion donor templates further comprises a nucleic acid sequence encoding a third CISC component that is different from the first and second CISC components and is capable of specifically binding to the CISC inducer molecule. In some embodiments of the methods provided herein: (a) the DNA endonuclease is selected from a an RNA-guided nuclease (RGN), CRISPR/Cas nuclease, a TALEN, a meganuclease, megaTAL, or a zinc finger nuclease, (b) the constitutively active promoter is MND, insertion is by a mechanism selected from homology-directed repair or non-homologous end joining, (d) the first and second CISC components comprise intracellular domains that are selected in a mutually exclusive manner from IL2RB or IL2RG, and comprise extracellular domains that are selected in a mutually exclusive manner from FKBP and FRB, (e) the third CISC component is FRB, which is encoded by either the first or second donor template, (f) the CISC inducer molecule is rapamycin or an analog thereof, and/or (g) the first and second donor template are inserted into two distinct loci, wherein each locus is selected independently from the group consisting of a FOXP3 locus, a TRAC locus, an AAVS1 locus, and a ROSA26 locus. Any method for gene editing is contemplated herein, including, without limitation, viral and non-viral approaches that enable targeted gene-editing (e.g., Cas9, ZFN, TALEN). Accordingly, a method of gene editing as provided herein may make use of a nuclease to target a locus or a targeted locus on a nucleic acid sequence. In some embodiments, a nuclease is Cas9, a zinc-finger nuclease or TALEN.

[0067] Some embodiments of the methods and compositions provided herein include a method of producing any one of the foregoing artificial antigen-specific immunoregulatory T (airT) cells, comprising performing any one of the foregoing methods of producing an artificial antigen-specific immunoregulatory T (airT) cell.

[0068] In some embodiments there is provided a method for treating, inhibiting, or ameliorating a subject having a condition in need of antigen-specific immunosuppression, comprising administering to the subject a therapeutically effective amount of a plurality of the artificial immunoregulatory T (airT) cells, wherein said airT cells express at least one T cell receptor (TCR) or chimeric antigen receptor (CAR) that specifically recognizes the antigen for which antigen-specific immunosuppression is needed. In some embodiments the condition in need of antigen-specific immunosuppression is an autoimmune condition, an alloimmune condition, an allergic condition, or an inflammatory condition. In some embodiments, an autoimmune disease is a condition in which an immune response targets healthy cells, tissues, and/or organs, causing immune-associated pathology. In some embodiments, an autoimmune disease is immune-associated pathology resulting from dysregulation of the immune response. In some embodiments (i) the autoimmune condition is selected from type 1 diabetes mellitus, multiple sclerosis, systemic lupus erythematosus, myasthenia gravis, rheumatoid arthritis, early onset rheumatoid arthritis, ankylosing spondylitis, immune-mediated pregnancy loss, immune-mediated recurrent pregnancy loss, dermatomyositis, psoriatic arthritis, Crohn's disease, inflammatory bowel disease (IBD), ulcerative colitis, bullous pemphigoid, pemphigus vulgaris, autoimmune hepatitis, psoriasis, Sjogren's syndrome, celiac disease; (ii) the allergic condition is selected from allergic asthma, atopic dermatitis, pollen allergy, food allergy, drug hypersensitivity, contact dermatitis; and (iii) the inflammatory condition is selected from pancreatic islet cell transplantation, asthma, steroid-resistant asthma, hepatitis, traumatic brain injury, primary sclerosing cholangitis, primary biliary cholangitis, polymyositis, stroke, Still's disease, acute respiratory distress syndrome, uveitis, inflammatory bowel disease (IBD), ulcerative colitis, graft-versus-host disease (GvHD), tolerance induction for transplantation, transplant rejection, or sepsis. In some embodiments, the inflammatory condition is primary biliary cholangitis. In some embodiments, the inflammatory condition is primary sclerosing cholangitis. In some embodiments, the inflammatory condition is autoimmune hepatitis. In some embodiments, the autoimmune condition is type 1 diabetes. In some embodiments, the inflammatory condition is islet cell transplantation. In some embodiments, the inflammatory condition is transplant rejection. In some embodiments, the autoimmune condition is multiple sclerosis. In some embodiments, the inflammatory condition is inflammatory bowel disease. In some embodiments, the inflammatory condition is acute respiratory distress syndrome. In some embodiments, the inflammatory condition is stroke. In some embodiments, the inflammatory condition is graft-versus-host disease. In some embodiments (i) the antigen associated with pathogenesis of the autoimmune condition is selected from an autoantigen set forth in any one or more of FIGS. 141-144, (ii) the antigen associated with pathogenesis of the allergic condition is selected from an allergenic antigen set forth in any one or more of FIGS. 141-144, and (iii) the antigen associated with pathogenesis of the inflammatory condition is selected from an inflammation-associated antigen set forth in any one or more of FIGS. 141-144.

[0069] Some embodiments of the methods and compositions provided herein include a method for treating or ameliorating a subject having a disorder comprising administering to the subject any one of the foregoing artificial immunoregulatory T (airT) cells. In some embodiments, a method for treating or ameliorating further comprise administering a CISC inducer molecule (e.g., rapamycin or a rapalog) to the subject before or after administering the airT cells to promote proliferation, activation, and/or maintenance of the airT cells in vivo.

[0070] In some embodiments, the disorder is selected from the group consisting of an autoimmune disease (e.g., diabetes such as type-1 diabetes, primary biliary cholangitis), autoinflammatory disease (e.g., ARDS, stroke, and atherosclerotic cardiovascular disease), alloimmune disease (e.g., graft-versus-host disease, sold organ transplant, and immune mediated recurrent pregnancy loss), and/or allergic disease (e.g., asthma, drug hypersensitivity, and celiac disease). In some embodiments, a condition to be treated is a cancer. Wang et al. (J Intern Med. 2015 October;278(4):369-95) provide a review of autoimmune diseases, which review is incorporated herein by reference. In some embodiments, the disorder is selected from the group consisting of type 1 diabetes mellitus, multiple sclerosis, systemic lupus erythematosus, myasthenia gravis, rheumatoid arthritis, early onset rheumatoid arthritis, ankylosing spondylitis, immune-mediated pregnancy loss, immune-mediated recurrent pregnancy loss, dermatomyositis, psoriatic arthritis, Crohn's disease, inflammatory bowel disease (IBD), ulcerative colitis, bullous pemphigoid, pemphigus vulgaris, autoimmune hepatitis, psoriasis, Sjogren's syndrome, celiac disease, allergic asthma, atopic dermatitis, pollen allergy, food allergy, drug hypersensitivity, contact dermatitis, pancreatic islet cell transplantation, asthma, steroid-resistant asthma, hepatitis, traumatic brain injury, primary sclerosing cholangitis, primary biliary cholangitis, polymyositis, stroke, Still's disease, acute respiratory distress syndrome, uveitis, inflammatory bowel disease (IBD), ulcerative colitis, graft-versus-host disease (GvHD), tolerance induction for transplantation, transplant rejection, or sepsis. In some embodiments, the TCR polypeptide binds to an antigen associated with a disorder selected from type 1 diabetes mellitus, multiple sclerosis, myocarditis, rheumatoid arthritis (RA), or systemic lupus erythematosus (SLE).

[0071] In some embodiments, the TCR polypeptide binds to an antigen selected from the group consisting of vimentin, aggrecan, cartilage intermediate layer protein (CILP), preproinsulin, islet-specific glucose-6-phosphatase catalytic subunit-related protein (IGRP), and enolase. In some embodiments, the TCR polypeptide binds to an antigen comprising an epitope having the amino acid sequence of any one of SEQ ID NOs 1363-1376 and 1408-1415. In some embodiments, the TCR polypeptide binds to an antigen present in or derived from a microorganism present in the gut. In some embodiments, the TCR polypeptide binds to an epitope of the bacterial protein OmpC. In some embodiments, the TCR polypeptide binds to an epitope of a T1D antigen, .e.g., GAD65, PPI, or ZNT8. In some embodiments, the TCR polypeptide binds to an epitope of a PBC antigen, e.g., the E2 component of pyruvate dehydrogenase complex (PDC-E2). In some embodiments, the TCR polypeptide binds to a nuclear antigen. In some embodiments, the TCR polypeptide binds to a mitochondrial antigen.

[0072] In some embodiments, the TCR polypeptide comprises: a CD3 alpha polypeptide having the amino acid sequence of any one of SEQ ID NOs 1377-1390; and/or a CD3 beta polypeptide having the amino acid sequence of any one of SEQ ID NOs 1377-1390.

### BRIEF DESCRIPTION OF THE DRAWINGS

[0073] FIGS. 1A-11 relate to the engineering of human CD4+ T cells into airT cells using gene editing.

[0074] FIG. 1A, FIG. 1B and FIG. 1C depict exemplary schema for converting CD4+ T cells into airT cells of the present disclosure. FIG. 1A is a schematic diagram of FOXP3 locus before (top) and after (bottom) gene editing using FOXP3 TALEN or CRISPR/Cas9 with FOXP3 guide RNA. TALEN or CRISPR/Cas9 cleaves FoxP3 locus at exon 1, initiating site-specific double stranded DNA break. AAV provides donor template containing MND and GFP (to allow analysis of editing efficiency), which is inserted into exon 1 at the DNA break. After the homology-directed repair, the MND promoter drives expression of FoxP3 and GFP reporter. FIG. 1B depicts a timeline of steps of gene editing and cell analysis and efficacy of airT generation from input Tconv cells. FIG. 1C depicts representative flow plots showing correlation between Foxp3 and GFP on day 4 after editing. The three panels on the right-hand side of the figure show CD25, CD127, Helios, CD45RO, ICOS, and CTLA-4 expression in Foxp3+ GFP+ gated cells, respectively.

[0075] FIG. 2 depicts flow plots (bottom) showing GFP and Foxp3 expression on day 4 and day 11 after editing according to the timeline shown at top. These data show that Foxp3 editing in CD4+ T cells is efficient and results in high, stable expression of Foxp3.

[0076] FIG. 3A, FIG. 3B, FIG. 3C and FIG. 3D depict data comparing airT cells and activated natural T regulatory (nTreg) cells. FIG. 3A depicts a timeline of steps to generate edTreg and activated nTreg for comparison. CD4+ cells were isolated from PBMC using MACS CD4+ isolation kit and Tconv (CD25− CD127+) and Treg (CD25 high CD127−) cells were further sorted by flow. Sorted Tconv and Treg cells were activated with CD3/CD28 activator beads and beads were removed after 48 hr activation. Only Tconv cells were Foxp3-edited using Cas9/Foxp3 gRNA and AAV-MND-LNGFR-Foxp3 ki to generate edTreg/airT. nTreg cells were treated in the same manner without Foxp3 editing. LNGFR+ cells from Foxp3-edited Tconv cells were enriched using MACS LNGFR beads on day 10. LNGFR+edTreg and nTreg cells were used for suppression assay. FIG. 3B depicts a comparison of efficacy in generation of edTreg and nTreg from 1×10⁷ PBMC. At day 0, 1×10⁷ PBMC. Tconv and nTreg cells activated on day 0 were expanded 10-30 times and 1-2 times, respectively, from day 0 to day 10. For edTreg, Treg yield on day 10 was calculated based on editing rate (10-30%). FIG. 3C depicts representative flow plots showing Treg phenotype in Foxp3-edited Tconv and nTreg cells on day 10. Top panels show (left-most panel) LNGFR expression in edited Tconv and (right) Foxp3, Helios, CD25, CD127, ICOS, and CTLA-4 expression in edited Treg (LNGFR+ gate, top panels) and nTreg (bottom panels). FIG. 3D (upper panels) depicts comparison of Foxp3, CTLA-4, and ICOS expression in edTreg/airT and nTreg. FIG. 3D (bottom table) shows the MFI.

[0077] FIG. 4A and FIG. 4B show that airT cells have superior in vitro suppressive activity to nTreg. FIG. 4A depicts data from an in vitro suppression assay comparing suppressive activities of edTreg/airT and nTreg on CD4+ T_{eff} cells at the indicated Treg:T_{eff} ratios. airT or nTreg cells were labeled with EF670, and CD4+ T_{eff} cells were labeled with Cell Trace Violet (CTV). T_{eff} cells were co-cultured with airT or nTreg at different ratios, 0:1 (T_{eff} only), 1:1, 1:2, 1:4, 1:8, 1:16, and 1:32 (Treg:T_{eff}). CD3/CD28 activator beads were added at 1:25 (bead to T_{eff} ratio) and cells were analyzed by flow after 4d incubation. Dilution of CTV in T_{eff} cells was measured as proliferation. FIG. 4B depicts percent suppression calculated as (% proliferation in T_{eff} only+beads−% proliferation in T_{eff} cells cultured with Treg)/(% proliferation in T_{eff} only+beads)×100.

[0078] FIG. 5 depicts exemplary lentiviral islet-specific TCR constructs expressing rare islet-specific TCRs derived from Type 1 diabetes (T1D) subjects. Panel A depicts a table of lentiviral vectors encoding GAD65 or IGRP specific TCRs (4.13, T1D2, T1D4, T1D5-1, or T1D5-2), their epitope specificity, and TCR alpha or beta chain usage. Panel B depicts structure of lentiviral islet-specific TCR. TCR constructs include human TCR variable regions from the islet-specific TCRs and mouse TCR constant regions that allow to improve pairing between the transduced human TCR chains.

[0079] FIG. 6 depicts validation of islet Ag-specific TCR expression: murine TCRβ expression and proliferation of islet antigen-specific T cells. Panel A depicts flow plots for CD4+ T cells isolated, activated with CD3/CD28 beads, and transduced with LV islet-TCRs. Flow plots show mTCRβ expression gated on CD3/CD28-activated CD4+ cells day 9 post-transduction with lentivirus (LV) encoding islet-specific TCR. Panel B depicts flow plots for CD4+ T cells transduced with LV islet-TCRs labeled with CTV and co-cultured with APC (irradiated PBMC) and their cognate peptide or irrelevant peptide for 5 days. Flow plots showing cell proliferation of LV-transduced CD4+ T cells labeled with CTV following 5-day co-culture with antigen-presenting cells (APC; irradiated PBMC) and cognate or irrelevant peptide. Proliferation is shown as CTV dilution.

[0080] FIG. 7 shows generation of Foxp3-edited T cells with islet-specific TCR. Panel A depicts a timeline of generating edTreg cells with islet-specific TCRs. Panel B depicts representative flow plots showing mTCRβ expression and LNGFR/Foxp3 expression on CD4+ cells on day 7 after transduction with T1D4 or T1D5-1 TCR and Foxp3 editing. Right panels show expression of CD25, CD127, CTLA-4, and ICOS gated on LNGFR+ cells.

[0081] FIG. 8 relates to exemplary antigen-specific suppression assays of the present disclosure. Panel A depicts a timeline for generation of edTreg cells expressing islet-specific TCRs. edTreg cells with islet-specific TCRs (no LV TCR, T1D4, or T1D5-1 TCR) were enriched by LNGFR expression using MACS LNGFR beads. LNGFR+ cells were aliquoted and frozen down for further experiments. Panel B depicts a summary of method used to assess antigen-specific suppression assays. CD4+ T cells transduced with islet-specific TCRs (T1D4 or T1D5-1 TCR) were used as T_{eff} cells. T_{eff} cells and Treg cells were labeled with different reagents, for example CTV or EF670, and co-cultured with or without edTreg cells with 1:1 or 1:2 ratio in the presence of APC (autologous irradiated PBMC) and various peptides. Cells were stained and analyzed by flow after 1 d or 4 d incubation for measuring cytokine generation and proliferation of T_{eff} cells, respectively.

[0082] FIG. 9 and FIG. 10 depict suppressive activity of edTreg/airT on T_{eff} proliferation in the presence of APC and the indicated peptide(s). T_{eff} and Treg cells were labeled with CTV and EF670, respectively. CD4+ T cells transduced with T1D4-TCR (T1D4 T_{eff}) were co-cultured with or without edTreg expressing T1D4-TCR (T1D4 edTreg) or T1D5-1-TCR (T1D5-1 edTreg) in the presence of APC and various peptides (DMSO, IGRP 241, IGRP 305, or IGRP241+IGRP 305). 4 days after the co-culture, cells were stained and analyzed for T_{eff} proliferation as dilution of CTV. Flow plots show T_{eff} proliferation gated on CD3+ CD4+ CTV+ EF670− LNGFR−.

[0083] FIG. 11 depicts suppression of cytokine generation in T_{eff} by edTreg/airT. T_{eff} and Treg cells were labeled with CTV and EF670, respectively. T1D4 T_{eff} cells were cocultured with or without untransduced edTreg or T1D4 edTreg/airT cells in the presence of APC and peptides (DMSO or IGRP 241). 1 day after the co-culture, cells were contacted with BFA for 4 h, stained, and analyzed for cytokine generation from T_{eff} cells. Flow plots show TNF, IFNg, or IL-17 generation from T1D4 T_{eff} cells gated on CD4+ CTV+ EF670−.

[0084] FIGS. 12-17 relate to the development and characterization of antigen-specific human Foxp3-edited human CD4+ T cells.

[0085] FIG. 12 depicts (top) an exemplary scheme for generating human antigen-specific edTreg/airT from peripheral blood cells and (bottom) phenotype of FOXP3-edited human antigen-specific CD4+ T cells. In the bottom panels, representative flow plots (left) and percentage (right) of GFP expression in tetramer positive (Tr+; a mixture of MHC class II tetramers with flu or tetanus peptides) human CD4+ T cells at 4 days post-gene editing (n=5).

[0086] FIG. 13 depicts a characterization of FOXP3-edited human antigen-specific CD4+ T cells. Panel A depicts phenotype of FOXP3 edited human antigen-specific CD4+ T cells. Bar chart summarizes flow cytometry data (n=5); chart shows expression of Treg markers and intracellular IL-2 production in Tmr+edTreg, Tmr+ Mock-edited cells, as well as in thymus-generated Treg (tTreg) obtained from an unrelated donor. Data shown are representative of 5 independent experiments. P values of statistically significant differences are indicated above bars. Panel B depicts human antigen-specific edTreg/airT suppresses proliferation of T_{eff} in vitro. Suppression assays conducted using Tmr+edTreg/airT or mock-edited Tmr+ cells co-cultured with T_{eff} from healthy controls, APCs, and soluble anti-CD3 and anti-CD28. Ratio of antigen presenting cells (irradiated CD4− PBMC): Tmr+edTreg or mock-edited Tmr+ cells: T_{eff} was 2:1:1. 1 μCi ³H was added 18 hours prior to the end of the 4 day assay and proliferation was measured by a scintillation counter. Bar graph indicated averaged results from three experiments with three donors.

[0087] FIG. 14 depicts successful generation of antigen-specific edTreg/airT by peptide stimulation followed by Foxp3 editing. Panel A depicts a timeline of steps of antigen-specific T cell expansion and gene editing. After 9 days of peptide stimulation to expand T cells specific for MP, HA, or Tetanus, cells were activated with CD3/CD28 activator beads for gene editing. Beads were added to the sorted cells to enhance expansion of antigen-specific Tregs. Panel B depicts flow plots show GFP and Foxp3 expression on day 15 after editing. GFP+ Foxp3+ cells were CD25+ CD127− and about 60% of cells were MP, HA, or TT specific by tetramers.

[0088] FIG. 15 depicts antigen-specific suppression by Foxp3-edited Tregs/airT. Panel A a timeline of steps of generating antigen-specific edTreg/airT cells for suppression assay. GFP+ cells were sorted and expanded with CD3/CD28 beads on day 15 after editing. Beads were removed after 7d incubation and edTreg/airT cells were harvested and used for suppression assay after 11 days of expansion. Panel B depicts a summary of suppression assay design. CD4+CD25+ cells were isolated from autologous PBMC, labeled with EF670, and used as T_{eff} cells. CD4−CD25+ cells were irradiated and used as APC, and edTreg/airT cells were labeled with Cell Trace Violet (CTV). T_{eff} cells and APC were co-cultured with or without edTreg/airT cells in the presence of DMSO or peptide pool (MP+HA+TT). Panel C depicts after 7 days of co-culture, cells were stained and analyzed by flow. CD3+CD4+EF670+ CTV− cells were gated as T_{eff} cells. Panel D depict a dilution of EF670 in T_{eff} cells was measured as proliferation and 15% of EF670− cells from co-culture of T_{eff} cells with APC and the peptide pool was normalized as 100% proliferation. % suppression was calculated as (100-% Proliferation).

[0089] FIG. 16 depicts an expansion of islet-specific T cells of multiple specificities by peptide stimulation. Panel A depicts an exemplary timeline for generating islet-antigen specific edTreg/airT cells. Freshly isolated CD4+CD25− cells were stimulated by a pool of islet-specific peptides and APC (irradiated autologous CD4− CD25+ cells) for 14 days and expansion of islet-specific T cells was analyzed on day 13 by tetramer staining. Panel B depicts flow plots showing islet-specific T cells stained by individual tetramers or tetramer pool, gated on CD4+ cells.

[0090] FIG. 17 depicts generation of islet-specific Tregs of multiple specificities. Panel A depicts islet-specific T cells were stained by tetramers and sorted on day 14. Sorted tetramer+ cells were activated with CD3/CD28 beads for 72 h for Foxp3 editing. 3 days after editing, cells were stained and analyzed. Flow plots show Foxp3 and LNGFR expression in mock or edited cells (left) and CD25, CD127, and CD45RO expression in LNGFR+ gated cells (right). Panel B depicts cells were stained by individual tetramers or tetramer pool and flow plots show tetramer+ cells in LNGFR+ Foxp3+ edited cells.

[0091] FIGS. 18-33 relate to the generation of dual-edited human CD4+ T cells using bi-allelic targeting to engineer artificial Treg cells expressing Foxp3 and antigen-specific TCR, with endogenous TCR inactivation.

[0092] FIG. 18 depicts a schematic of an exemplary CD4+ T cell edited to possess Treg phenotype and to express exogenous Ag-specific TCR, but not endogenous TCR. In this scheme, the conversion of a conventional CD4+ T-cell into an antigen-specific Treg comprises three genetic alterations: 1) stable expression of the transcription factor FOXP3 to drive cells toward a Treg phenotype; 2) stable expression of a defined, antigen-specific rearranged T-Cell receptor (Ag-specific TCR) to direct Treg immunosuppressive activity; and 3) genetic deletion of the endogenous T-Cell Receptor (TCR) to ensure that immunosuppressive function is directed solely toward the desired antigen.

[0093] FIG. 19 depicts exemplary AAV constructs for CRISPR gene editing at the human and mouse TRAC loci. The list includes adeno-associated virus plasmid constructs generated for CRISPR-based homology directed repair, organized based on the relevant gRNA, and includes number designation.

[0094] FIG. 20 depicts an exemplary CRISPR-based approach for targeting of the human TRAC locus for knockout/knock-in. In particular, the image shows a schematic representation of the human TRAC locus showing the relative position of the four gRNA sequences tested (PC_TRAC_E1_gRNA1 to PC_TRAC_E1_gRNA4). The TRAC exon 1 is indicated by the lowermost bar from about position 1160 continuing past 1400. Common SNPs are indicated by about positions 1160 and 1400. The position of a previously published positive control gRNA sequence (TCRa G4old) is indicated at about position 1320.

[0095] FIG. 21 relates to guide RNA (gRNA) qualification of non-homologous end joining (NHEJ) for knockout of CD3 in human CD4+ primary T cells. Data are from FACS analysis. Panel A depicts flow plots show expression of CD3 2 days post-editing in mock-edited and TCR-edited CD4+ T cells using four different guide RNAs. TCRa_G4old, previously demonstrated to knockout CD3 expression, was used as a control. Panel B depicts histograms showing percent CD3 knockout.

[0096] FIG. 22 depicts results from Inference of CRISPR Edits (ICE) analysis of indel frequency. On-target site-specific activity was measured by ICE (Inference of CRISPR Edits) and confirmed specific indel induction for gRNA_1 and gRNA_4 in TRAC relative to predicted off-target sites.

[0097] FIG. 23 depicts results from ICE analysis of predicted off target sites for TRAC gRNAs. The top 3 predicted off target sites for TRAC gRNA 1 and TRAC gRNA 2 (based on frequency and position of mismatches) were tested for indel induction frequency by ICE sequence deconvolution analysis.

[0098] FIG. 24 depicts an exemplary experimental outline for performing dual AAV editing for assessment of bi-allelic knock-in. A. Diagram of AAV constructs used in this experiment; after editing, MND promoter drives expression of GFP/BFP. B. Timeline of experimental procedures. CD4+ T cells were bead-stimulated (CD3/CD28) for 3 days prior to editing. Three and six days post-editing, cells were evaluated for GFP and BFP expression by flow cytometry.

[0099] FIG. 25 depicts dual editing of the TRAC locus in human CD4+ cells leads to a double-positive population of cells. Panel A depicts flow plots show GFP and BFP expression in mock-edited, and mixed MND.GFP- and MND.BFP-edited cells (10% #3207 virus+10% #3208 AAV) two days post-editing. Viral titers were 3.3×10¹² and 2.53×10¹² for #3207 and #3208, respectively. Panel B depicts histograms showing percent double-negative, GFP single-positive, mCherry single-positive and GFP/mCherry double-positive cells within the dual-edited cells.

[0100] FIG. 26 depicts schematic diagrams showing exemplary Split IL-2 CISC HDR knock-in constructs for selection of dual-edited cells. In the depicted constructs, CISC (chemically induced signaling complex) is split onto 2 different constructs and each CISC component is co-expressed with a different reporter, in this case either GFP or mCherry. Each construct contains half of a rapamycin-binding complex (either FKBP or FRB domain, with the chimeric endoplasmic reticulum targeting domain fused to one half of an IL-2R signaling complex (IL-2RB or IL-2RG) transmembrane and intracellular domains. Delivery of cDNA encoding each CISC component co-expressed with the GFP/mCherry tag to primary human CD4+ T cells allows selective expansion of cells that contain both CISC components and thus are also dual edited for GFP and BFP.

[0101] FIG. 27 depicts an exemplary timeline of steps for dual AAV editing of CD4+ T cells, expansion with rapalog, and analysis of enriched cells. Cells were bead stimulated (CD3/CD28) for 3 days prior to editing. Two days post-editing, cells were analyzed by flow for GFP and mCherry expression, and then expanded in media containing 50 ng/ml human IL-2 or 100 nM rapalog. Flow cytometry to assess enrichment of GFP, mCherry double-positive cells was carried out on days 6, 8, and 10 post-editing.

[0102] FIG. 28 depicts FACS analysis of initial dual editing rate. Panel A depicts flow plots show GFP and mCherry expression in mock-edited, MND.GFP.FRB.IL-2RB-edited (20% #3207 AAV), MND.mCherry.FKBP.IL-2RB (20% #3208 AAV)-edited and mix-edited (10% #3207+10% #3208) cells. Viral titers were 3.3×10¹² and 2.53×10¹² for #3207 and #3208, respectively. Panel B depicts histograms show percent of double-negative, GFP-positive, mCherry-positive and GFP/mCherry double-positive cells within the dual-edited cells.

[0103] FIG. 29 depicts exemplary data showing rapalog enrichment of dual-edited cells. Panel A depicts flow plots show GFP and BFP expression in mock-edited, and mixed MND.GFP- and MND.BFP-edited cells (10% #3207 virus+10% #3208 AAV) two days post-editing. Viral titers were 3.3×10¹² and 2.53×10¹² for #3207 and #3208, respectively. Panel B histograms showing percent double-negative, GFP single-positive, mCherry-single positive and GFP/mCherry double-positive cells within the dual-edited cells.

[0104] FIG. 30 depicts histograms showing percent double-negative, GFP single-positive, and mCherry single-positive cells after contact with IL-2 and rapalog. These data show that single-positive and unedited populations do not significantly change with rapalog treatment.

[0105] FIG. 31 depicts data from FACS analysis of initial dual editing rates using two different donors. Panel A depicts a timeline of editing and analysis steps. Panel B depicts histograms showing percent double-negative, GFP-positive, mCherry-positive and GFP/mCherry double-positive cells within the dual-edited cells for each donor. Donor R003657 is male, Caucasian and 28 y.o. Donor R003471 is male, Caucasian and 29 years old.

[0106] FIG. 32 depicts data from FACS analysis of rapalog enrichment of Bi-Allelic R003471 cells. Panel A depicts flow plots showing expression of GFP and mCherry following 5 days enrichment in rapalog. Panel B depicts histograms showing percent GFP/mCherry double-positive cells after expansion in IL-2 or rapalog.

[0107] FIG. 33 depicts schematic diagrams showing exemplary split-CISC constructs for insertion of TCR and Foxp3 and enrichment of dual edited cells. CISC is split onto two different constructs and each CISC component is co-expressed with either an Ag-specific TCR (in the diagram, exemplary T1D4 TCR) or Foxp3. Each construct contains half of a rapamycin-binding complex (either FKBP or FRB domain, with the chimeric endoplasmic reticulum targeting domain fused to one half of an IL-2R signaling complex (IL-2RB or IL-2RG) transmembrane and intracellular domains. Delivery of cDNA encoding each CISC component co-expressed with the T1D4 TCR/Foxp3 to primary human CD4+ T cells allows selective expansion of cells that contain both CISC components and thus are also dual edited for T1D4 TCR and Foxp3.

[0108] FIGS. 34-37 relate to the generation of reagents for assessing antigen-specific airT cell function in in vivo models of autoimmunity.

[0109] FIG. 34 depicts a schematic representation of the murine TRAC locus showing the relative position of the three novel gRNA sequences tested (PC_mmTrac_E1_gRNA1 to PC_mmTrac_E1_gRNA3). The TRAC exon 1 is indicated.

[0110] FIG. 35 depicts data from FACS analysis of CD3 knockout in murine CD4+ T cells. Panel A depicts flow plots show expression of murine CD3 two days post-editing in mock-edited and TCR-edited CD4+ T cells using three different guides. Panel B depicts histograms showing percent mCD3 knockout for each guide RNA.

[0111] FIG. 36 depicts an exemplary experimental outline for dual AAV editing for assessment of bi-allelic knock-in. Panel A depicts a diagram of AAV constructs used in this experiment; after editing, MND promoter drives expression of GFP/BFP. B. Timeline of experimental procedures. Murine CD4+ T cells were bead stimulated (CD3/CD28) for 3 days prior to editing. Three and five days post-editing, cells were evaluated for GFP and BFP expression by flow cytometry.

[0112] FIG. 37 depicts data from FACS analysis of single- and dual-editing rates in the murine TCRα locus. Flow plots show GFP and BFP expression 3 days post-editing in mock, MND.GFP (10% #3211), MND.BFP (10% #3212), and mix-edited cells (5% #3207+5% #3208). Mixed edited cells had a total of 1.97% GFP/BFP double-positive cells.

[0113] FIGS. 38-43 relate to airT cell function in an antigen-specific in vivo setting.

[0114] FIG. 38 depicts a schematic diagram of an experimental design to test the ability of MOG-specific edTreg/airT cells (shown in white) to suppress T effectors (T_{eff}) cells (shown in gray) in a mouse model of multiple sclerosis, Experimental Autoimmune Encephalomyelitis.

[0115] FIG. 39 relates experiments showing that mouse FOXP3 TALENs catalyze efficient FOXP3 disruption and initiate non-disruptive recombination of donor template. Panel A depicts binding sites for the FOXP3 TALEN pair in the human FOXP3 gene. Panel B depicts target binding sites for the mouse FOXP3 TALEN pair in the murine FOXP3 gene. Panel C depicts indel frequency at FOXP3 TALEN cut site in human (left) and mouse (right) CD4+ T cells 5˜7 days after transfection with mRNA encoding either control mRNA (encoding blue fluorescent protein), or TALENs specific for human FOXP3 or mouse FoxP3, respectively. Graph shows average frequency of indels after colony sequencing PCR amplicons surrounding gDNA target site; 20-40 colonies were sequenced per experiment.

[0116] FIG. 40 relates to generation of edTreg/airT from antigen-specific murine CD4+ T cells. Panel A depicts a schematic diagram of FOXP3 locus after successful gene editing using mouse FOXP3 TALENs and the mouse AAV FOXP3 MND-GFP knock-in (ki) donor template. After editing, the MND promoter drives expression of chimeric GFP-FoxP3 protein. Panel B depicts flow plots showing GFP expression in antigen-specific mouse CD4+ T cells at Day 2 post-editing. Panel C depicts average percent of GFP+ cells across multiple experiments (n=10). D. Flow plot of murine edTreg/airT showing expression of relevant Treg markers.

[0117] FIG. 41 shows functional assessment of antigen specific vs. polyclonal edTreg/airT in a mouse model of Multiple sclerosis. Panel A depicts flow plots showing GFP expression in MOG-specific and polyclonal mouse CD4+ T cells at Day 2 post-editing after FACS sorting. Panel B depicts schematic diagram of murine EAE in vivo experimental design and timeline. 2D2 (MOG-specific) T_{eff} (30K) were delivered with or without co-transferred edTreg/airT (30K) generated from either 2D2 or C57B1/6 mice into RAG1−/− recipient mice; all strains were on C57B1/6 background. Analysis was performed at Day 7.

[0118] FIG. 42 depicts data showing that antigen-specific edTreg/airT delay expansion, activation and cytokine production of T_{eff}. Immunophenotype of T cells obtained from inguinal and axillary lymph nodes in recipient mice at day 7 post-cell transfer was assessed by flow cytometry. CD45+=panCD45 (recognizing all CD45 isoforms and both CD45.1 and CD45.2 alloantigens). Shown are total number of total CD45+ CD4+ cells (A) and other indicated T cell subsets (B) and (C), expansion of GFP+ cells. Data is representative of results from 3 independent experiments; bar graphs show mean±SD; p-values of statistically significant differences are indicated above bars.

[0119] FIG. 43 provides data showing that antigen-specific edTreg/airT cells suppress T_{eff} proliferation in vivo. Panel A depicts flow plots: to label actively dividing cells, the thymidine analog 5-Ethynyl-2′-deoxyuridine (EdU) was administered 2 hours prior to sacrifice in selected animals. EdU incorporation in T cells was determined by intracellular labeling with an anti-EdU antibody and flow cytometry. Flow plots are from T cells isolated from LNs 7 days post-cell transfer. Panel B depicts bar graphs summarize mean % of cells incorporating EdU in different cell subsets and (C) the % GFP+lymphocytes. Flow plots are representative of results from at least 3 independent experiments; bar graphs show mean±SD; p-values of statistically significant differences are indicated above bars.

[0120] FIGS. 44-47 relate to experiments investigating antigen specific T cell function in a NSG adoptive transfer model of Type 1 diabetes. Engineered antigen-specific (BDC) or polyclonal (NOD) edTregs/airTs, or antigen-specific nTregs were infused into the mice followed by infusion of antigen-specific T_{eff} cells. Mice were monitored for diabetes up to 90 days following infusion. Graph shows the percent of diabetic mice that received effector cells plus the designated mock edited, Foxp3-edited, or nTreg cells from NOD and BDC2.5 mice.

[0121] FIG. 44 relates to Foxp3 editing in CD4+ T cells of antigen-specific NOD mice. Panel A depicts CAS9/CRISPR RNP cutting efficiency in BDC2.5 NOD mice using different guide RNAs. Panel B depicts AAV5-delivered repair template. After editing, the MND promoter will drive expression of chimeric GFP-FoxP3 protein. Panel C depicts flow plots showing GFP expression in mock-edited and GFP-Foxp3-edited antigen-specific mouse CD4+ T cells at day 2 post-editing.

[0122] FIG. 45 relates to phenotype of FOXP3-edited antigen-specific NOD CD4+ T cells. Left. Flow cytometry plots showing GFP and Foxp3 expression in edited cells. Middle. Flow cytometry plots showing IL-2, IFN-g and IL-4 expression in GFP-Foxp3-edited (upper plots) and mock-edited (lower plots) murine antigen-specific NOD CD4+ T cells. Right. Histograms showing % of cells positive for IL-2, IFN-γ and IL-4 four days post-editing.

[0123] FIG. 46 relates to an experiment investigating phenotype of input cells for NSG adoptive transfer model. Panel A depicts an experimental design showing amount and type of cells administered for each group of animals. Panel B depicts flow cytometry plots showing the phenotype of T_{eff}, edTreg/airT and nTreg cells injected into NSG mice.

[0124] FIG. 47 relates to antigen-specific T cell function in NSG adoptive transfer model. Panel A depicts an experimental design; engineered antigen-specific (BDC) or polyclonal (NOD) edTregs/airTs, or antigen-specific nTregs were infused into the mice, followed by infusion of antigen-specific T_{eff} cells. Mice were monitored for diabetes up to 90 days following infusion. Panel B depicts a graph shows the percent of diabetic mice that received effector cells plus the designated mock-edited, Foxp3-edited, or nTreg cells from NOD and BDC2.5 mice. Antigen-specific edTreg/airT exhibited significantly greater level of protection from T1D compared with mock-edited T cells, polyclonal edTregs/airTs or polyclonal nTregs.

[0125] FIGS. 48-51 relate to engineering a mouse AAV donor template design to generate airT cell product with a selectable marker (LNGFR).

[0126] FIG. 48 depicts exemplary repair templates used in murine Foxp3 editing. AAV.Promoter-LNGF.P2A knock-in constructs were tested in murine T cells for stable expression of Foxp3.

[0127] FIG. 49 depicts phenotype of murine edTreg/airT using alternative homology donor cassettes. Flow cytometry plots show LNGFR, FOXP3, CD25, and CTLA-4 in mock-edited cells and cells edited with MND.LNGFR.P2A KI (3189) or PGK.LNGFR.P2A KI (3227).

[0128] FIG. 50 depicts data showing editing rate and expression of LNGFR in murine edited Treg/airT cells. Flow cytometry plots show LNGFR and GFP expression in mock, MND-GFPki (#1331) MND.LNGFR.P2A.KI (#3189) edited cells.

[0129] FIG. 51 depicts data showing enrichment of LNGFR+ edited T cells from B6 mice using an anti-LNGFR column. Flow cytometry plots show LNGFR expression of cells prior to purification on a Miltenyi anti-LNGFR column, cells in the flow through and cells eluted from the column.

[0130] FIG. 52 depicts a comparison of FOXP3-edited vs. FOXP3 lentiviral (LV) transduced human CD4 T cells. Panel A depicts a diagram of LV construct: MND promoter drives expression of a transcript encoding identical GFP-FOXP3 fusion protein as that of airT; transcript contains WPRE and poly(A) signals for efficient nuclear export and mRNA stability. Below are representative flow plots showing FOXP3 and GFP expression in mock-edited T cells or sorted tTreg (CD4+CD25++CD127−), airT and LV Treg (CD4+GFP+), all post ≥14-day expansion in vitro with CD3/CD28 beads. Panel B depicts mean viral copy number (±SD) of LV-transduced sorted cells (left; n=6). Scatter plots (right) show the MFI of the GFP+ population for each sample (n=5; P value from two-tailed Student's T-test). Panel C depicts bar graphs showing mean % of cells (top), and MFI (bottom) by flow cytometry staining for the proteins indicated. Viable singlets were further gated on: CD4+ GFP+ (LV Treg and edTreg), CD4+FOXP3+ (tTreg), or CD4+ (mock). For markers with distinct bimodal distributions, MFI was calculated for the positive population only. Error bars show±SD. An ordinary two-way ANOVA was performed, and P values adjusted with Tukey's multiple comparisons test. P values in black indicate comparison with mock-edited cells; those in red were comparison of groups indicated by dashed lines. Panel D depicts percent suppression as a function of Treg or mock dilution (top). Histograms of proliferation dye at different ratios of Treg or mock to T_{eff} (bottom). % suppression=[(% divided with no Treg−% divided with Treg)/% divided with no Treg]×100. Panel E depicts a plot showing data points and simple linear regression of % GFP+ cells over time in culture after FACS purification; airT (n=4) and LV Treg (n=6); data from 6 experiments. Dashed lines indicate 95% confidence intervals; P value was obtained using an F Test.

[0131] FIGS. 53-73 provide additional schematics and data related to exemplary dual-editing strategies of the present disclosure for generation of antigen-specific, drug-selectable airT cells with knock-out of endogenous TCR.

[0132] FIG. 53 depicts schematics showing dual-editing strategies designed to: a) eliminate the endogenous TCR expression and b) generate selectable antigen-specific airTs. Delivery of expression cassettes for FOXP3 and a candidate islet antigen-specific TCR (T1D4) paired to the two halves of the IL-2 CISC/DISC (FKBP-IL2RG and FRB-IL2RB), can be directed to the same locus (Strategy 1) or two separate loci (Strategy 2). Targeting of the TRAC locus in CD4+ T cells allows for deletion of the endogenous TCR. Strategy 2 may result in higher initial dual editing rates but requires two nuclease target sites, leading to two double stranded breaks (DSBs) in the host cell genome that mediate HDR. Strategy 1 utilizes a single nuclease target site leading to a single DSB.

[0133] FIG. 54 depicts a schematic of AAV HDR donor constructs used in human T cell dual-editing. The first 7 constructs are IL-2 split-CISC repair templates with either GFP, mCherry, HA-tagged FOXP3 or T1D4 driven by the MND promoter. Each component of the split CISC includes a heterodimeric rapamycin binding complex (either FKBP and FRB domains), along with the chimeric endoplasmic reticulum targeting domain fused to one half of the IL2R signaling complex (either IL2RB or IL2RG) trans-membrane and intracellular domains. Each repair template is flanked by 300 bp homology arms matched to a gRNA targeting either the TRAC locus (gRNA_4) or FOXP3 locus (gRNA_T9) (#3207, 3208, 3240, 3243, 3251, 3252, 3273). The next four constructs (#3253, 3258, 3292, 0001) are used for in-frame knock-in of a promoter-less TCR cassette including components of the CISC, targeting the first exon of TRAC locus (gRNA_1). The final two constructs (#3280 and #3262) are split-DISC repair templates that include the CISC elements as well as cDNA encoding a free FRB domain that functions in cytoplasmic Rapamycin sequestration (which eliminates or reduces any negative impact of rapamycin on gene edited cells). These latter constructs also contain either mCherry or FOXP3 driven off the MND promoter.

[0134] FIG. 55 depicts dual editing rates within the human TRAC locus in the presence or absence of rapalog-based selection of CISC edited CD4+ T cells from donor R003657. Panel A depicts a timeline of editing (using RNP and AAV co-delivery), enrichment and analysis steps with donor R003657 CD4+ T cells using AAV #3207 and #3208. Panel B depicts flow plots show initial percent GFP/mCherry double positive cells in the mock vs. dual-edited samples, and percent GFP/mCherry double positive following 7 days enrichment in the presence of IL-2 or Rapalog (AP21967). Panel C depicts histograms show percent double-negative, GFP-positive, mCherry-positive and GFP/mCherry double-positive cells within the dual-edited cells following enrichment in IL-2 vs. Rapalog.

[0135] FIG. 56 depicts dual editing rates in the TRAC locus and rapalog-based selection of CISC-edited CD4+ T cells from donor R003471. Panel A depicts a timeline of editing, enrichment and analysis steps with donor R003471 CD4+ T cells using AAV #3207 and #3208. Panel B depicts flow plots show initial percent GFP/mCherry double-positive cells in the mock- vs. dual-edited samples, and percent GFP/mCherry double-positive following 7 days enrichment in the presence of IL-2 or Rapalog (AP21967). Panel C depicts histograms show percent double-negative, GFP-positive, mCherry-positive and GFP/mCherry double-positive cells within the dual-edited cells following enrichment in IL-2 vs. Rapalog.

[0136] FIG. 57 shows dual-editing of the TRAC locus in human CD4+ T cells generates rapalog-selectable, antigen-specific airTs. Panel A depicts a schematic showing AAV HDR donors construct used to introduce of the “split” IL-2 CISC elements for selection of dual-edited cells. CISC components (IL2RG vs. IL2RB) are split between 2 constructs and co-expressed with either HA-FoxP3 cDNA or the islet-specific TCR, T1D4 (AAVs #3240 and #3243 respectively). Each repair template is flanked by identical homology arms that cannot be cleaved by the gRNA targeting the TRAC locus. Only edited CD4+ T cells incorporating one copy of each construct are predicted to selectively expand under Rapalog treatment. Panel B depicts a timeline of key steps for dual AAV/RNP-based editing of CD4+ T cells, expansion with Rapalog and analysis of enriched cells. Cells were bead stimulated (CD3/CD28) for 3 days prior to editing. Two days post-editing, cells were analyzed by flow for HA-FoxP3 and TCR expression, and then expanded in media containing 50 ng/ml human IL-2 or 100 nM Rapalog. Flow cytometry to assess enrichment of HA-FoxP3, TCR double-positive cells was carried out on days 5 and 8 post-editing. Panel C depicts rapalog enrichment of dual-edited cells. Left panel: Flow plots for HA-FoxP3 and TCR in dual-edited cells following 8 days expansion in IL-2 or Rapalog; Right panel: quantitation of percent HA-FoxP3/TCR double-positive cells following expansion in IL-2 or Rapalog for 5 and 8 days.

[0137] FIG. 58 provides data showing that decreasing serum concentration increases total- and dual-editing rates within the TRAC locus. Panel A depict a timeline showing steps for dual AAV editing of CD4+ T cells and expansion with Rapalog. Human CD4+ T cells were edited using TRAC gRNA_4 and #3243 and #3240 AAV constructs (Single-locus dual editing). Immediately following electroporation to deliver the RNP, the cells were placed in either 20%, 2.5%, 1% or 0% FBS containing media (recovery media) and infected with AAV. After ˜16 hours, the media was replaced with 20% FBS containing media and FACS analysis done on day 3 to determine editing rate. Cells recovered in 2.5% FBS containing media were expanded in the presence of either IL-2 or Rapalog for an additional 7 days. Panel B depicts flow plots show T1D4 and FOXP3 expression in mock-edited, single-edited and mixed edited cells (10% #3243 and 10% #3240 AAV) three days post editing. Viral titers were 4.2E¹¹ and 1.3E¹² for #3243 pAAV.MND.T1D4.FRB.IL2RB and #3240 pAAV.MND.FOXP3-HA.FKBP.IL2RG respectively. Panel C depicts histograms show percent double-negative, FOXP3-HA-positive, T1D4-positive and FOXP3/T1D4 double-positive cells within the dual-edited cells.

[0138] FIG. 59 shows IL-2 vs. Rapalog enrichment of dual-edited cell populations. TRAC locus dual-editing was performed as shown in FIG. 5. Panel A depicts flow plots show T1D4 and FOXP3 expression in mock-edited vs. FOXP3/T1D4 (#3240/3243) dual-edited cells treated with either 50 ng/mL IL-2 or 100 nM Rapalog (AP21967) for 7 days. Data are shown only for the 2.5% FBS recovery media condition. Panel B depicts histograms show percent double-negative, FOXP3-HA-positive, T1D4-positive and FOXP3/T1D4 double-positive cells within the dual-edited cells following enrichment.

[0139] FIG. 60 relates to a strategy for testing two-loci dual-editing of human CD4+ T cells. Panel A depicts a diagram of AAV HDR-donor constructs designed to introduce split IL-2 constructs for selection of dual-edited cells using a two loci dual-editing approach. CISC components are split between 2 constructs and co-expressed with either mCherry or GFP (#3207 and #3251 respectively). Repair templates are flanked by homology arms matched to gRNAs targeting either the TRAC or FOXP3 locus, respectively. Only edited CD4+ T cells that incorporate both expression cassettes (into the appropriate locus) are predicted to selectively expand under Rapalog treatment. Panel B depicts a timeline showing steps for dual AAV editing of CD4+ T cells and expansion with Rapalog. Human CD4+ T cells were edited using human TRAC gRNA_4, human FOXP3 gRNA_T9 and #3251 (MND.mCherry.FKBP.IL2RG) and #3207 (MND.GFP.FRB.IL2RB) AAV constructs (two-loci dual editing). Immediately following electroporation, the cells were placed in either 20% or 2.5% FBS containing media (recovery media). After ˜16 h, the media was replaced with 20% FBS containing media and FACS analysis done on day 3 to determine editing rate. Cells recovered in 2.5% FBS containing medium were further grown in the presence of either IL-2 or Rapalog for an additional 7 days to monitor enrichment.

[0140] FIG. 61 shows that recovery in 2.5% FBS containing medium improves dual-editing rates measured at Day 3 post-editing. Two-loci dual editing was performed as shown in FIG. 59. Panel A depicts flow plots show GFP and mCherry expression in mock-edited and dual-edited cells in 20% FBS vs. 2.5% FBS recovery media at 3 days post-editing. Viral titers were 6.55E\hat{ }10 and 2.50E\hat{ }12 for #3251 pAAV.MND.mCherry.FKBP.IL2RG and #3207 pAAV.MND.GFP.FRB.IL2RB respectively, and 10% culture volume of each virus was used for the editing reactions. Panel B depicts histograms show percent double-negative, GFP-positive, mCherry-positive and GFP/mCherry double-positive populations within the dual-edited cells.

[0141] FIG. 62 shows robust enrichment of two-loci dual-edited cells treated with rapalog selection. Two-loci dual-editing was performed as shown in FIG. 59. Panel A depicts flow plots show GFP and mCherry expression in mock-edited and GFP/mCherry (#3207/3251) edited cells (edited in 2.5% serum) treated with either 50 ng/mL IL-2 vs. 100 nM Rapalog (AP21967) for 10 days. Panel B depicts histograms show percent double-negative, GFP-positive, mCherry-positive, and GFP/mCherry double-positive cells within the edited population following treatment in IL-2 vs. Rapalog for 10 days.

[0142] FIG. 63 relates to engineering of two-loci dual-editing of human CD4+ T cells. Editing conditions and timeline for dual AAV editing of CD4+ T cells and expansion with Rapalog. Human CD4+ T cells were edited using human TRAC gRNA_4, human FOXP3 gRNA_T9 and #3251 (MND.mCherry.FKBP.IL2RG) and #3207 (MND.GFP.FRB.IL2RB) AAV (two-loci dual editing). Editing conditions were varied according to the table with different % of viral stock and either in the presence of the HDR enhancer or DMSO. Immediately following electroporation, the cells were placed in 2.5% FBS containing media (recovery media). After ˜16 h, the media was replaced with 20% FBS containing media and FACS analysis done on day 3 to determine editing rate. Cells recovered in 2.5% FBS containing medium were further grown in the presence of either TL-2 or Rapalog for an additional 10 days to monitor enrichment.

[0143] FIG. 64 depicts a graph showing that matched 10% volume of AAV HDR donors leads to improved dual editing. Editing was performed as outlined in FIG. 62. Graphs show percent double-negative, GFP-positive, mCherry-positive and GFP/mCherry double-positive populations within the dual-edited cells 3 days post-editing with varying amounts of #3207 and #3251 AAV in the presence of 30 uM HDR enhancer or DMSO.

[0144] FIG. 65 provides data showing robust enrichment of two-loci dual-edited CD4+ T cells with rapalog selection; with optimal results using 2.5% FBS media and matched 10% volume of AAV donor. Editing was performed as outlined in FIG. 62. Graphs show the cells from FIG. 10, (edited in 2.5% serum, matched 10% virus+/−HDR enhancer) as percent double negative, GFP positive, mCherry positive, and GFP/mCherry double positive cells within the editing population following contact with IL-2 or Rapalog for 10 days.

[0145] FIG. 66 provides a diagram of exemplary split-CISC constructs for insertion of islet-specific TCR and FOXP3 and enrichment of dual-edited cells using a two-loci dual-editing strategy. The IL-2 CISC (chemically induced signaling complex) is split onto 2 different constructs and co-expressed with either T1D4 TCR or FOXP3 (#3243 and #3252 respectively). Each construct contains half of a heterodimeric rapamycin binding complex (FKBP and FRB domains), along with the chimeric endoplasmic reticulum targeting domain fused to one half of the IL-2R signaling complex (IL-2RB or IL-2RG) trans-membrane and intracellular domains. Delivery of cDNA encoding each CISC component co-expressed with the T1D4 TCR/FOXP3 to primary human CD4+ T cells allows us to only expand cells that contain both CISC components and thus are also dual edited for T1D4 TCR and FOXP3 expression.

[0146] FIG. 67 shows an exemplary strategy for single locus dual-editing with capture of TRAC promoter. Schematic of AAV HDR-editing constructs designed for dual-editing within the TRAC locus to introduce: (top) (#3240 FOXP3 expression and split CISC and (bottom) (#3258) in-frame knock-in to TRAC exon 1 to drive expression of T1D4 TCR and split CISC using the TRAC endogenous promoter.

[0147] FIG. 68 shows that TRAC locus HDR editing disrupts TCR expression and mediates robust transgene expression via the endogenous TRAC enhancer-promoter. Panel A depicts an editing strategy for in-frame integration of a mCherry-Split-CISC cassette at the endogenous TRAC locus. By using a gRNA targeting the TRAC exon 1, in-frame integration of a marker fluorophore (mCherry) followed by the FRB-IL2RB CISC separated by a P2A element (construct #3253) allows for expression driven by the endogenous TRAC promoter, while disrupting expression of the endogenous TCR. Panel B depicts a timeline showing steps for AAV #3253 editing of CD4+ T cells. Cells were bead-stimulated (CD3/CD28) for 3 days prior to editing. Panel C depicts an analysis: seven days post-editing, cells were analyzed by flow for CD3 and mCherry expression. Flow cytometry plots show significant expression of mCherry with concomitant loss of CD3 in edited cells compared to mock-edited and AAV-only controls.

[0148] FIG. 69 shows comparison of mCherry expression mediated via the TRAC endogenous promoter vs. MND promoter. Gene editing was performed as shown in FIG. 67 using alternative HDR donors (#3253 vs. #3208) to assess the relative expression activity from the TRAC endogenous promoter vs. MND promoters, respectively. Flow cytometry plots shows that the level of mCherry expression when driven off the endogenous promoter (P2A.mCherry.FRB.IL2RB (#3253)) is lower than compared to when driven by the MND promoter (MND.mCherry.FKBP.IL2RG (#3208). The bottom row of panels shows data from a repeat experiment performed using the #3253 donor.

[0149] FIG. 70 show exemplary alternative dual-editing strategies for targeting the TRAC and/or FOXP3 loci and that utilize in-frame knock-in constructs to capture the TRAC endogenous promoter. Schematic of exemplary AAV donor constructs for testing single-locus and two-loci dual-editing strategies and to generate antigen-specific airT with IL-2 CISC selection capacity. T1D4 TCR is shown as a representative TCR that can be replaced by alternative TCRs based upon disease target and other relevant features for therapeutic application. IL-2 DISC constructs are similarly applied.

[0150] FIG. 71 relates to dual-editing of human CD4+ T Cells using decoy-CISC (split-DISC) constructs. Panel A depicts a diagram of Split IL-2 DISC HDR knock-in construct (#3280) for selection of dual-edited cells in Rapamycin. To generate the split decoy-CISC (split-DISC), the free FRB domain for cytoplasmic Rapamycin sequestration was added to the MND.mCherry.FKBP.IL2RG construct to generate (MND.mCherry.FKBP.IL2RG.FRB (#3280)). Each repair template (#3280 and #3207, not shown) is flanked by identical homology arms matched to a gRNA targeting the TRAC locus. Edited CD4+ T cells incorporating one copy of each construct are predicted to selectively expand under Rapalog or Rapamycin treatment. Panel B depicts a timeline showing steps for dual AAV editing of CD4+ T cell using AAV #3280 and #3207), expansion with Rapalog/Rapamycin and analysis of enriched cells. Cells were bead-stimulated (CD3/CD28) for 3 days prior to editing. Two days post-editing, cells were analyzed by flow for GFP and mCherry expression, and then expanded in media containing 50 ng/ml human IL-2, 100 nM Rapalog or 10 nM Rapamycin. Panel C depicts flow plots show the percentage of GFP/mCherry double-positive cells on day 3 post-editing.

[0151] FIG. 72 shows that dual editing of human CD4+ T cells with split-DISC constructs generates Rapamycin-selectable cells. Dual-editing was performed as described in FIG. 70. Panel A depicts flow plots show percent double-positive GFP/mCherry cells following 8 days in the presence of 50 ng/mL human IL-2, 100 nM Rapalog (AP21967), 10 nM Rapamycin, or no treatment. Panel B depicts histograms quantitate percent double-negative, GFP-positive, mCherry-positive and GFP/mCherry double-positive cells within the dual-edited cells following enrichment in IL-2, Rapalog (AP21967), Rapamycin or no treatment.

[0152] FIG. 73 show exemplary constructs for in vivo testing of dual-edited Tregs (split-DISC). Diagram of FOXP3 split IL-2 DISC HDR knock-in construct (#3262) to be paired with a T1D4 CISC construct (#3243) for Rapamycin selection of dual-edited cells. CISC components are split between 2 constructs and co-expressed with either HA-FoxP3 or T1D4 TCR. The FOXP3 CISC construct also contains the FRB domain and is predicted to protect mTOR signaling in the presence of Rapamycin (FOXP3 DISC construct). Each repair template is flanked by identical homology arms matched to a gRNA targeting the TRAC locus. Edited CD4+ T cells incorporating one copy of each construct may selectively expand under both Rapalog and Rapamycin treatment.

[0153] FIGS. 74-94 provide additional schematics and data related to generation and characterization of murine airT cells.

[0154] FIG. 74 depicts repair templates used in murine Foxp3 editing. Diagram of alternative AAV.GFP.KI and AAV.LNGFR.P2A constructs that were developed and tested in murine T cells for editing efficiency, FOXP3 expression and suppressive function.

[0155] FIG. 75 depicts a schematic showing methods used for generation of murine airT using the MND.GFP.KI (or alternative) HDR donor construct.

[0156] FIG. 76 relates to generation and enrichment of murine airT cells utilizing alternative promoters to express endogenous Foxp3. Flow cytometry plots showing LNGFR and GFP expression prior to and post LNGFR enrichment via FACS sorting in mock, MND.GFP.KI (#1331), MND.LNGFR.P2A (#3189 and 3261), PGK.LNGFR.P2A (#3227) and EF-1a-LNGFR.P2A (#3229) edited cells. Upper plots show initial editing rates and lower plots show enrichment post FACS sorting. Data indicate that airT can be generated with each of the candidate donor constructs.

[0157] FIG. 77 depicts expression levels of Foxp3 in murine airT using alternative homology donor cassettes. Panel A depicts flow cytometry plots showing LNGFR and GFP expression in HDR-edited splenic T cells. Panels show un-manipulated C57BL/6 control cells; mock-edited, MND.GFP.KI (#1331), MND.GFP.KI with UCOE (#3213), and PGK.GFP.KI (#3209)-edited C57 BL/6 murine T cells, respectively. Panel B depicts flow histograms showing FOXP3 expression from the data in panel A. Panel C depicts a bar chart showing FOXP3 MFI in nTreg and edTreg/airT generated with the indicated alternative HDR-donor constructs. MND promoter containing donors mediate the highest levels of FOXP3 expression.

[0158] FIG. 78 depicts design of, and results from, an in vitro suppression assay using murine tTreg or airT. A. airT cells used for in vitro suppression assay were enriched by FACS sorting at day 2 post editing and resuspended into RPMI media containing 10% FBS. nTregs (CD4+CD25+), T_{eff} (CD4+CD25−) and antigen presenting cells (CD4−CD25−) were isolated from the combined spleen and lymph node cells of 8 to 10 weeks-old C56BL/6 mice by column enrichment. Enriched 5×10⁶ T_{eff} were resuspended in 2 ml of PBS and labeled with cell trace violet (CTV) for 15 minutes at 37° C., then washed and resuspended in media before their addition in the suppression assay. To set up the assay, 1.25×10⁵ irradiated APCs (2500 rad) were co-cultured with 0.25×10⁵ T_{eff} and a titrated number of nTregs and airT in the presence of 1 mg/ml anti-CD3 in a U bottom 96 well tissue culture plate with total volume of 300 ul media and incubated at 37° C. CO₂ incubator for four days. At day 4, cells were washed twice with PBS and stained with live/dead indicator, anti-CD4, anti-CD45 and anti-CD25, and analyzed by FACS (LSRII) for the suppression of T_{eff} proliferation by airT. B) Representative flow data showing a reduction of T_{eff} proliferation in the presence of airT cells.

[0159] FIG. 79 depicts results from testing murine airT suppressive function in vitro. Flow cytometry plots showing cell trace violet labeled CD4+ T cells in the presence and absence of mock-, MND.GFP.KI- (#1331), or MND.LNGFR.P2A- (#3261-edited T cells, or nTregs from C57 BL/6 mice. These data demonstrate that murine airT (generated with the MND.GFP.KI or MND.LNGFR.P2A HDR donors) and nTregs exhibit comparable, robust in vitro suppressive function.

[0160] FIG. 80 depicts in vitro suppressive function of murine airT with alternative promoters. Flow cytometry plots showing cell trace violet-labeled CD4+ T cells in the presence and absence of mock-edited, MND.GFP.KI- (#1331), MND.LNGFR.P2A- (#3261), PGK.LNGFR.P2A- (#3227), and EF-1a.LNGFR.P2A (#3229)-edited T cells, or nTregs from C57 BL/6 mice. Murine airT with MND promoter exhibit suppressive function that is comparable to nTreg. In contrast, airT using the PGK or EF-1a promoters exhibit only limited or no suppression.

[0161] FIG. 81 depicts the design of an experiment to compare sorted vs. column-purified enriched LNGFR+ edited cells in an NSG adoptive transfer model. The table lists the number of recipient NSG host animals, and source and number of adoptively transferred control, airT or nTreg cells in each of the 5 experimental cohorts

[0162] FIG. 82 depicts flow analysis of LNGFR.P2A-edited NOD BDC2.5+ murine cells prior to and post-column purification. Panel A depicts flow cytometry plots showing LNGFR expression in mock-, and MND.LNGFR.P2A- (#3189)-edited cells. Panel B depicts flow cytometry plots showing LNGFR expression in MND.LNGFR.P2A (#3189)-edited cells post enrichment via sorting. FACS sorting consistently enriched to edTreg products of >90% purity for use in in vitro and in vivo studies.

[0163] FIG. 83 depicts a flow analysis of edited murine cells before and after column enrichment. Flow cytometry plots showing MND-LNGFR.P2A (#3189) edited cells prior to- and post-column enrichment. In this example of enrichment, 72×10⁶ cells with initial editing rate of ˜7% were added to an anti-LNGFR column yielding 2×10⁶ edTreg with >84% purity.

[0164] FIG. 84 depicts an experimental design and results assessing islet antigen-specific airT function in the NSG adoptive transfer model: comparison of FACS-sorted and column-enriched airT. Islet antigen-specific (BDC) airT (generated using the HDR donors, 3261 or 3389), or antigen-specific nTregs were adoptively transferred by retro-orbital (R.O.) delivery into adult, 8-10 wk old recipient NSG mice, followed by infusion of antigen-specific T_{eff} cells. Mice were monitored for development of diabetes for up to 60 days. Graph shows the percent of diabetic mice after receiving effector cells plus the designated mock-edited, MND.LNGFR.P2A-edited (FACS sorted or column enriched), or nTreg cells from NOD BDC2.5 mice. Column-enriched Ag-specific MND.LNGFR.P2A airT reduced diabetes incidence in NSG mice and shows comparable function to FACS-sorted airT. Higher doses of column-enriched MND.LNGFR.P2A airT or nTreg fully protected recipient animals from development of diabetes.

[0165] FIG. 85 depicts a comparison of in vivo function of airT generated using alternative promoters in the NSG adoptive transfer model. Engineered antigen-specific (BDC) airT (generated using either the MND or PGK promoter; donor constructs 1331 or 3209, respectively), or antigen-specific nTregs were adoptively transferred into NSG recipient mice followed by infusion of antigen-specific T_{eff} cells. Mice were monitored for development of diabetes for up to 60 days. Graph shows the percent of diabetic mice after receiving effector cells (5×10⁴) plus the designated mock edited, MND.GFP.KI (#1331), PGK.GFP.KI (#3209) airT or nTreg cells (5×10⁴) from NOD BDC2.5 mice. Antigen-specific airT with the MND promoter prevented diabetes development in all recipient mice. nTreg prevented disease in ⅘ recipient mice. In contrast, antigen-specific airT that incorporated the PGK promoter had little or no protective effect. These data directly demonstrate that protection from T1D is specific to airT generated using the MND promoter to drive Foxp3 expression supporting the use of this architecture in human trials for T1D or other immune diseases.

[0166] FIG. 86 shows that islet Ag-specific MND.GFP.KI airT persist in vivo in the target organ (pancreas) for at least 60 days and exhibit a stable phenotype. Flow cytometry plots showing FOXP3 and GFP expression in MND.GFP.KI (#1331) NOD BDC2.5 airT recovered in the pancreas at day 60 following adoptive transfer in NSG mice. Data shows results from two mice. Recipient mice also exhibit expansion of endogenous Treg or iTreg (FOXP3+. GFP− CD4 T cells) derived from the input T_{eff} population (likely secondary to additional beneficial bystander impacts of airT delivery).

[0167] FIG. 87 depicts design and results of CRISPR-based targeting of the murine Rosa26 Locus for Knock-in/knock-out. Panel A depicts the Rosa26 locus was selected as a model of a safe-harbor HDR integration site for murine T cells. Position of the two novel gRNAs (gRNA_1 and gRNA_2) within the murine Rosa26 locus. gRNAs from Pesch et. al. and Wu et. al. comprise previously published gRNAs within this locus region. Panel B depicts on-target site-specific activity as measured by ICE (Inference of CRISPR Edits) demonstrates specific indel induction using R26 gRNA_1 in Rosa26 after Cas9-RNP delivery to primary mouse CD4+ T-Cells.

[0168] FIG. 88 depicts an experimental outline for HDR editing at the mouse Rosa26 locus. Panel A depicts a diagram of AAV construct #3245 used in this experiment. After HDR-based editing in mouse T cells, the MND promoter drives expression of GFP. Panel B depicts a timeline of experimental procedures. Murine C57BL/6J CD4+ T cells were isolated and bead stimulated (CD3/CD28) for 3 days prior to editing. Cells were evaluated for GFP by flow cytometry at days 3 and 8 post editing.

[0169] FIG. 89 depicts data demonstrating HDR-based editing within the Rosa26 locus in murine CD4+ T cells. CD4+ T cells were edited as outlined in FIG. 88 and assessed at Day 3 by flow cytometry. Panel A depicts flow plots showing GFP expression in mock-edited, AAV #3245 alone and AAV #3245/RNP-edited cells at 3 days post editing. Panel B depicts histograms show percent viability, % GFP positive cells and high GFP+ cells within the edited population.

[0170] FIG. 90 shows that murine T cells maintain stable expression of GFP following HDR editing of the Rosa26 locus. CD4+ T cells were edited as outlined in FIG. 88 and assessed at Day 8 by flow cytometry. Panel A depicts flow plots show GFP expression in mock edited, AAV #3245 alone and AAV #3245/RNP edited cells 8 days post editing. Panel B depicts histogram shows % GFP positive cells within the edited population.

[0171] FIG. 91 depicts schematics of AAV HDR donor constructs for expression of murine Foxp3- and P2A- linked LNGFR within the Rosa26 locus in murine T cells. Repair templates are flanked by 300 bp homology arms matched to R26_gRNA_1 cleavage site and contain alternative promoters (MND or PGK) driving expression of mFOXP3 and LNGFR. In addition, a cassette containing a Foxp3 4× CDK phosphorylation site mutant is included as this construct is predicted increase the stability of Foxp3.

[0172] FIG. 92 relates to lentiviral CISC constructs used to transduce murine CD4+ T cells and test selective expansion with Rapalog. Panel A depicts a diagram of lentiviral construct #1272. This construct was developed to assess proof-of-concept for enrichment of murine T cells using human CISC components in the presence of Rapalog. After transduction of mouse T cells, the MND promoter drives expression of mCherry linked to IL-2 CISC components (FKBP-IL2RG and FRB-IL2RB). Panel B depicts a timeline of experimental procedures. Murine C57BL/6J CD4+ T cells were bead stimulated (CD3/CD28) for 3 days prior to transduction. Cells were evaluated for mCherry by flow cytometry at days 2 and 5 post-transduction.

[0173] FIG. 93 shows that murine CD4+ T cells transduced with lentiviral CISC show robust enrichment in Raplog. Panel A depicts flow plots show mCherry expression 2 days following mock or lentiviral transduction (#1272) of murine CD4+ T cells. Panel B depicts flow plots show mCherry expression in mock murine cells treated with IL-2, IL-7 and IL-15, or lentiviral (#1272) transduced murine cells that are treated with either IL-2, IL-7 and IL-15, Rapalog alone, or Rapalog+bead stim.

[0174] FIG. 94 shows that airT cells suppress proliferation of CD8+ T cells, as well as CD4+ T cells.

[0175] FIG. 95 depicts a schematic of a process for generating antigen-specific airT cells by stimulation with a model antigen peptide (MP) and editing for FoxP3 expression.

[0176] FIG. 96 depicts antigen-specific suppression by MP peptide-specific airT cells. Briefly: T_{eff}: day 23 T cells stimulated by MP peptide (right) or HA peptide (left); Treg: day 23 edited cells specific for MP peptide (right) or HA peptide (left), edited by CRISPR/Cas9 and AAV Foxp3-MND-LNGFRki; APC: irradiated autologous CD4−CD25+ cells DMSO or HA peptide 5 μg/ml; 6 day incubation.

[0177] FIG. 97 shows that airT cells show suppressive activity on T_{eff} proliferation. Briefly: 3 day incubation; for bead suppression: T_{eff}+Treg (untd edTreg, T1D5-1 airT, or T1D5-1 mock); For Ag-specific suppression: T1D5-1 T_{eff}+Treg; T_{eff} gate: CD4+ CD11c-CTV+ EF670-mTCRb+ gate.

[0178] FIG. 98 depicts suppression of cytokine production in T_{eff} by airT. Briefly: T1D4 T_{eff}; Treg (d10): T1D4 mock or T1D4 airT; and Peptide 1 μg/ml; for a 3 day incubation.

[0179] FIG. 99 depicts antigen-specific and bystander suppression on T_{eff} by airT. Briefly: T_{eff} 1.25×10⁴; Treg 2.5×10⁴; APC 1×10⁵; and Peptide 5 μg/ml.

[0180] FIG. 100 depicts antigen-specific and bystander suppression on T_{eff} by airT. Briefly: T_{eff} 1.25×10⁴; Treg 2.5×10⁴; APC 1×10⁵; and Peptide 5 μg/ml.

[0181] FIG. 101 shows bystander suppression of T_{eff} cytokine production. Briefly: T1D5-2 T_{eff}; Treg (d10): T1D4 mock or T1D4 edTreg; and Peptide 1 μg/ml; and 3 day incubation.

[0182] FIG. 102 shows dose response of TCR: proliferation assay. Briefly: mTCR expression data: day 8 post-transduction; Proliferation assay: day 11 cells, and 4 day incubation.

[0183] FIG. 103 shows validation of islet Ag-specific TCR expression: mTCRb expression & proliferation assay. Briefly: T cells: day 9 post transduction, labeled with Cell Trace Violet; APC: irradiated CD4−CD25+ cells; and 5 day incubation.

[0184] FIG. 104 shows that antigen-specific GFP+ airT can be detected in the pancreas. See also FIG. 107 and FIG. 116.

[0185] FIG. 105 relates to generation and enrichment of murine LNGFR+ airT cells for in-vivo suppression studies. See also FIG. 114.

[0186] FIG. 106 shows that Ag-specific MND.LNGFR.P2A-airT completely prevented diabetes in NSG mice. See also FIGS. 115, 134 and 135.

[0187] FIG. 107 shows that antigen-specific GFP+ airT can be detected in the pancreas.

[0188] FIG. 108 shows schematics and data related to an exemplary IL-2 CISC of the present disclosure.

[0189] FIG. 109 shows that in vivo rapamycin contact promotes CISC cell persistence.

[0190] FIG. 110 shows a schematic of an exemplary edited cell of the present disclosure.

[0191] FIG. 111 relates to gRNA selection for TRAC locus targeting.

[0192] FIG. 112 relates to a dual editing strategy with IL-2 Split-CISC components targeted to the TRAC locus.

[0193] FIG. 113 shows that CISC-engagement selects for dual-edited cells in-vitro.

[0194] FIG. 114 depicts a flow analysis of LNGFR.P2A-edited NOD BDC2.5+ murine cells prior to and post column purification. Panel A depicts a flow cytometry plots showing LNGFR expression specifically in MND.LNGFR.P2A (#3261)-edited cells but not in mock cells. Panel B depicts a flow cytometry plots showing LNGFR expression in MND.LNGFR.P2A (#3261)-edited cells in the flow through (F.T.) and eluted sample post enrichment via column purification. Column enrichment led to an airT product of 74.5% purity for use in in vivo studies.

[0195] FIG. 115 depicts an assessment of islet antigen-specific airT function in the NSG adoptive transfer model: Islet antigen-specific (BDC) airT (generated using the HDR donor 3261), or antigen-specific nTregs (50K), were adoptively transferred by retro-orbital (R.O.) delivery into adult, 8-10 wk old recipient NSG mice followed by infusion of 50K antigen-specific T_{eff} cells. Panel A depicts a flow cytometry plots showing the CD4 and CD25 profile of nTreg and LNGFR+ expression in MND.LNGFR.P2A (#3261)-edited cells. Panel B depicts a graph: mice were monitored for development of diabetes for up to 49 days. Graph shows the percent of diabetic mice after receiving effector cells plus the designated mock-edited, MND.LNGFR.P2A-edited (column enriched), or nTreg cells from NOD BDC2.5 mice. Column-enriched Ag-specific MND.LNGFR.P2A-airT completely prevented diabetes in NSG mice.

[0196] FIG. 116 shows that islet Ag-specific MND.GFP.KI airT persist in vivo in the target organ (pancreas) for at least 49 days and exhibit a stable phenotype. Flow cytometry plots showing LNGFR and FOXP3 expression in NOD BDC2.5 airT recovered in the pancreas at day 49 following adoptive transfer in NSG mice.

[0197] FIG. 117A depicts flow plots of mTCRb expression gated on CD4+ cells day 9 post-transduction.

[0198] FIG. 117B depicts flow plots of CD4+ T cells transduced with RA Ag-specific TCRs labeled with CTV and co-cultured with APC (irradiated PBMC) and their cognate peptide or DMSO for 3 days.

[0199] FIG. 118B depicts a polyclonal suppression assay and an antigen-specific suppression assay using enolase-specific edTreg.

[0200] FIG. 118C depicts a graph of percentage suppression of Teff proliferation by no Treg, untd edTreg, Enol edTreg, or mock in the presence of a-CD3/CD28 (black) or APC and enolase peptide (grey) calculated from percentage proliferation in FIG. 118B.

[0201] FIG. 119A depicts flow plots of mTCRb expression in untransduced edTreg and CILP297-1 edTreg gated on LNGFR+ Foxp3+ in edited cells transduced with no LV and LV CILP297-1-TCR, respectively.

[0202] FIG. 119B depicts a polyclonal suppression assay and an antigen-specific suppression assay using CILP-specific edTreg.

[0203] FIG. 119C depicts a graph of percentage suppression of CILP Teff proliferation by no Treg, untd edTreg, CILP edTreg, or mock in the presence of a-CD3/CD28 (black) or APC and CILP peptide (grey) calculated from percentage proliferation in FIG. 119B.

[0204] FIG. 120A depicts flow plots of mTCRb expression in untransduced edTreg and Vim418 edTreg gated on LNGFR+ Foxp3+ in edited cells transduced with no LV and LV Vim418-TCR, respectively.

[0205] FIG. 120B depicts a polyclonal suppression assay and an antigen-specific suppression assay using vimentin-specific edTreg.

[0206] FIG. 120C depicts a graph of percentage suppression of Vim Teff proliferation by no Treg, untd edTreg, Vim edTreg, or mock in the presence of a-CD3/CD28 (black) or APC and Vimentin peptide (grey) calculated from percentage proliferation in FIG. 120B.

[0207] FIG. 121A depicts flow plots show mTCRb expression in untransduced, Agg520, and Vim418 edTreg gated on LNGFR+ Foxp3+ in edited cells transduced with no LV, LV Agg520-TCR, and LV Vim418-TCR, respectively.

[0208] FIG. 121B depicts a polyclonal suppression assay using Agg520 Teff and edTreg or mock specific to Agg520 or Vim418.

[0209] FIG. 121C depicts a graph of percentage suppression of Agg520 Teff proliferation by no Treg, untd edTreg, Agg edTreg/mock, or Vim edTreg/mock calculated from percentage proliferation in FIG. 121B.

[0210] FIG. 121D depicts an antigen-specific and a bystander suppression assay using Agg520 Teff and edTreg or mock specific to Agg520 or Vim418.

[0211] FIG. 121E depicts a graph of percentage suppression of Agg520 Teff proliferation by no Treg, edTreg or mock calculated from percentage proliferation in FIG. 121D.

[0212] FIG. 122A depicts flow plots of mTCRb expression in untransduced, CILP297-1, and Vim418 edTreg gated on LNGFR+ Foxp3+ in edited cells transduced with no LV, LV CILP297-1-TCR, and LV Vim418-TCR, respectively.

[0213] FIG. 122B depicts a polyclonal suppression assay using CILP297-1 Teff and edTreg or mock specific to CILP297 or Vim418.

[0214] FIG. 122C depicts a graph of percentage suppression of CILP Teff proliferation by no Treg, untd edTreg, CILP edTreg or mock, or Vim edTreg or mock calculated from percentage proliferation in FIG. 122B.

[0215] FIG. 122D depicts an antigen-specific and bystander suppression assay using CILP297-1 Teff and edTreg specific to CILP297 and Vim418.

[0216] FIG. 122E depicts a graph of percentage suppression of CILP Teff proliferation by no Treg, edTreg or mock calculated from percentage proliferation in FIG. 122D.

[0217] FIG. 123A depicts flow plots of mTCRb expression and LNGFR/Foxp3 expression in edited cells expressing SLE3-TCR on day 7.

[0218] FIG. 123B depicts a polyclonal suppression assay and an antigen-specific suppressing assay using SLE-specific edTreg.

[0219] FIG. 124A depicts a schematic diagram of AAV HDR-donor constructs designed to introduce split-CISC elements into the TRAC locus using a single locus dual editing approach.

[0220] FIG. 124B depicts a timeline for key steps for dual AAV editing of CD4+ T cells and expansion with Rapalog.

[0221] FIG. 125A depicts flow plots of T1D4 and FOXP3 expression in mock edited, single edited and dual-edited cells (using 10% volume of both #3243 and #3240 AAV) at Day 3 post editing.

[0222] FIG. 125B depicts flow plots of T1D4 and CD4 expression in mock edited, and mixed edited cells.

[0223] FIG. 125C depicts histograms of percent double negative, FOXP3−HA positive, T1D4 positive and FOXP3/T1D4 double positive cells within the dual edited cells.

[0224] FIG. 125D depicts histograms of percent CD3 knockout in FOXP3/T1D4 dual edited cells vs. mock edited cells.

[0225] FIG. 126A depicts flow plots of viability and T1D4 and FOXP3 expression in dual-edited cells treated with either 50 ng/mL IL-2 (upper panels) or 100 nM Rapalog (AP21967; lower panels) for 7 days.

[0226] FIG. 126B depicts flow plots of CTLA4 expression of T1D4/FOXP3 double positive vs. double negative cell populations treated with either 50 ng/mL IL-2 (upper panels) or 100 nM Rapalog (AP21967; lower panels) for 7 days.

[0227] FIG. 127A depicts flow plots of viability (right plots) and T1D4 and FOXP3 expression (left plots) in dual-edited cells following treatment with 50 ng/mL IL-2 (upper plots) vs. 100 nM AP21967 (lower plots) after recovery in IL-2 medium.

[0228] FIG. 127B depicts a graph of fold enrichment of double positive T1D4/FOXP3 cells treated with either 50 ng/mL IL-2 or 100 nM Rapalog (AP21967) over a 10 day period with the last 3 days being in recovery media containing IL-2.

[0229] FIG. 128A depicts a diagram of Split IL-2 DISC HDR knock-in construct (#3280), for selection of dual-edited cells in either Rapamycin or Rapalog.

[0230] FIG. 128B depicts a timeline of key steps for dual AAV editing of CD4+ T cell using AAV #3280 and #3207, expansion with Rapalog/Rapamycin and analysis of enriched cells.

[0231] FIG. 129A depicts flow plot of mCherry and GFP expression in dual edited cells (10% culture volume of #3280 and #3207 AAV donors, respectively) four days post editing. Viral titers were 3.30E+12 and 3.1E+10 for #3280 and #3207 respectively. Dual-edit 4 million total cells initial dual positive rate: 4.47%. gRex vessel was seeded with 7.6 million total cells, 340,000 double-positive.

[0232] FIG. 129B depicts flow plots of viability (upper panel) and GFP and mCherry expression (lower panel) following the seeding of 7.6 million edited cells in gREX and 7 day expansion in the presence of AP21967 leading to 32-fold expansion of double-positive cells. Total double positive cells in gRex: 11.1 million.

[0233] FIG. 130A depicts a timeline of steps for dual AAV editing of CD4+ T cell using AAV #3280 and #3207, expansion with Rapalog and analysis of enriched cells.

[0234] FIG. 130B depicts flow plots of mCherry and GFP expression in dual edited cells (10% #3280 and 10% #3207 AAV). Viral titers were 3.30E+12 and 3.1E+10 for #3280 MND.mCherry.FKBP.IL2RG.FRB and #3207 pAAV.MND.GFP.FRB.IL2RB respectively. Edit 10 million total cells, initial dual positive rate: 2.37%. Seeded gRex with 9.1 million total cells 216,000 double-positive.

[0235] FIG. 131 depicts flow plots of viability and GFP and mCherry expression following the seeding of edited cells in gREX and 7 day expansion in the presence of AP21967. The results after 7 day expansion included Total double positive cells in gRex: 9.7 million; about 45-fold expansion from original 216,000 double positive cells.

[0236] FIG. 132A depicts a design for in vitro suppression assay using mouse edTreg or nTreg.

[0237] FIG. 132B depicts representative flow date showing a reduction of BDC2.5+ Teff proliferation in the presence of BDC2.5+ edTreg cells.

[0238] FIG. 133 depicts flow cytometry plots showing cell trace violet labeled CD4+ T cells in the presence and absence of mock, MND.LNGFR.p2A (#3261) edited Treg or nTregs from NOD BDC2.5+ mice. Murine Islet TCR+ edT_{reg} (generated with the MND.LNGFR p2A (#3261) HDR donors) and tTregs exhibit antigen-specific in vitro suppressive function. 50 K Teff+anti-CD3 (1 μg/ml)+200 K irradiated APCs (2500 rad). Analysis @Day 4. CTV=cell trace violet. Data shown: 1:1 (Teff to Treg ratio).

[0239] FIG. 134 depicts a graph of the percent of diabetic mice after receiving effector cells plus the designated mock edited, MND.LNGFR.P2A edited or nTreg cells from NOD BDC2.5 mice. Similar to nTregs, MND.LNGFR p2A edTregs completely prevented the onset of diabetes while mock edited control cells did not show any impact on disease onset.

[0240] FIG. 135 depicts a graph of the percent of diabetic mice after receiving effector cells plus the designated mock edited, MND.LNGFR.P2A edited or nTreg cells from NOD BDC2.5 mice in a repeat experiment. Column enriched Ag-specific LNGFR p2A edTregs completely prevented (Day 33) diabetes in NSG mice

[0241] FIG. 136A, FIGS. 136B and 136C each show a TABLE listing amino acid sequences of TCR alpha and beta CDR3 and J regions of TCR that specifically recognize antigens associated with pathogenesis of autoimmune, allergic, or inflammatory conditions.

[0242] FIG. 137 shows a TABLE listing amino acid sequences of TCR alpha and beta CDR3 and J regions of TCR that specifically recognize antigens associated with pathogenesis of autoimmune, allergic, or inflammatory conditions.

[0243] FIG. 138 shows a TABLE listing amino acid sequences of J regions of TCR that specifically recognize antigens associated with pathogenesis of autoimmune, allergic, or inflammatory conditions.

[0244] FIG. 139A shows a TABLE listing nucleotide sequences encoding TCR alpha and beta chain V regions of TCR that specifically recognize antigens associated with pathogenesis of autoimmune, allergic, or inflammatory conditions.

[0245] FIG. 139B shows a TABLE listing amino acid sequences of J regions of TCR that specifically recognize antigens associated with pathogenesis of autoimmune, allergic, or inflammatory conditions.

[0246] FIG. 140A shows a TABLE listing nucleotide sequences encoding TCR alpha and beta chain V regions of TCR that specifically recognize antigens associated with pathogenesis of autoimmune, allergic, or inflammatory conditions.

[0247] FIG. 140B shows a TABLE listing amino acid sequences of TCR alpha and beta J regions of TCR that specifically recognize antigens associated with pathogenesis of autoimmune, allergic, or inflammatory conditions.

[0248] FIG. 141 shows a TABLE listing amino acid sequences of antigenic epitopes recognized by specific TCR for a CYP2D6 antigen associated with autoimmune hepatitis type 2.

[0249] FIG. 142 shows a TABLE listing amino acid sequences of antigenic epitopes recognized by specific TCR for a BP230 or a BP180 antigen associated with bullous pemphigoid.

[0250] FIG. 143A shows a TABLE listing amino acid sequences of polypeptide antigens associated with pathogenesis of autoimmune, allergic, and/or inflammatory conditions, containing antigenic epitopes recognized by specific TCR and amino acid sequences of TCR alpha and beta CDR3 regions of TCR that specifically recognize the antigens.

[0251] FIG. 143B shows a TABLE listing amino acid sequences of polypeptide antigens associated with pathogenesis of autoimmune, allergic, and/or inflammatory conditions, containing antigenic epitopes recognized by specific TCR and amino acid sequences of TCR alpha and beta CDR3 regions of TCR that specifically recognize the antigens.

[0252] FIG. 144 shows a TABLE listing amino acid sequences of polypeptide antigens associated with pathogenesis of autoimmune, allergic, or inflammatory conditions, containing antigenic epitopes recognized by specific TCR and amino acid sequences of TCR alpha and beta CDR3 regions of TCR that specifically recognize the antigens.

[0253] FIG. 145 shows a TABLE listing certain nucleic acid sequences useful with embodiments provided herein including guide RNA (gRNA), and an AAV vector containing FOXP3 editing sequences.

[0254] FIG. 146 depicts schematic maps including: (panel A) a FOXP3 knock-in construct (3324) comprising elements encoding an FKBP-IL2RG polypeptide and an FRB polypeptide; (panel B) a TRAC-targeting HDR construct (3243) comprising elements encoding a T1D4 polypeptide and an FRB-IL2B polypeptide; (panel C) a TRAC-targeting HDR construct (3333) comprising elements encoding a T1D4 polypeptide and an FRB-IL2Bmin polypeptide, which comprises a truncated intracellular IL-2 receptor beta signaling domain.

[0255] FIG. 147 depicts FACS analysis of CD4+ T cells transduced with either constructs 3333/3324 (row A), 3243/3324 (row B), or control (row C).

[0256] FIG. 148 depicts (panel A) a FACS analysis of CD4+ T cells transduced with either constructs 3333/3324 (upper row), 3243/3324 (lower row) and treated for 7 days with 100 nM AP21967 (Rapalog), and includes viability versus cell size (FSC-A), T1D4 expression versus CD3 expression, and T1D4 expression versus HA-tagged FOXP31; and (panel B) a graph of double positive fold enrichment in the CD4+ T cells.

[0257] FIG. 149 depicts schematic maps of alternative TRAC-targeting HDR constructs including: (upper) a construct in which a micro-CISC component is proximal to a MND promoter; and (lower) a construct in which a TCR (T1D4) component is proximal to a MND promoter.

[0258] FIG. 150A depict (panel A) a graph of double positive fold enrichment in CD4+ T cells transduced with 3324/3323 constructs, and treatment over 7 days in either 50 ng/mL IL-2, 100 nM AP21967, or 10 nM rapamycin; and (panel B) a graph of double positive fold enrichment in CD4+ T cells transduced with 3324/3333 constructs, and treatment over 7 days in either 50 ng/mL IL-2, 100 nM AP21967, or 10 nM rapamycin.

[0259] FIG. 150B depicts schematic maps of contracts comprising sequences encoding a truncated FRB-IL2RB proximal to an MND promoter, (3323 and 3354), and a construct in which sequences encoding the truncated FRB-IL2RB were distal to an MND promoter with intervening sequences encoding a T1D4 TCR polypeptide (3234).

[0260] FIG. 150C depicts a FACS analysis of cells transduced with constructs shown in FIG. 150B including a combination of a FOX3P targeting construct (3324) and either the 3323, 3354 or 3243 construct. The enrichment capacity for the alternative TRAC targeting constructs was compared in an 8-day time course using 100 nM AP21967 (Rapalog), or 10 nM Rapamycin.

[0261] FIG. 150D depicts graphs of absolute vs fold enrichment between the different dual editing groups of FIG. 150B and FIG. C.

[0262] FIG. 151 depicts (panel A) a schematic map of a CISC construct with either a MND promoter (1272) or an EF1a promoter (3312); and (panel B) a FACS analysis of CD4+ T cells transduced with either the 1272 or the 3312 construct for mCherry signaling versus cell size.

[0263] FIG. 152 depicts (panel A) a FACS analysis of CD4+ T cells transduced with either the 1272 or the 3312 construct, following 7 days in 100 nM AP21967 (Rapalog) for viability versus cell size (FSC-A), and mCherry versus cell size; and (panel B) a graph of double positive fold enrichment of mCherry over 7 days in CD4+ T cells transduced with either the 1272 or the 3312 construct, and treated with 100 nM AP21967 (Rapalog).

[0264] FIG. 153 depicts (panel A) a timeline and steps of peptide stimulation to expand islet-specific T cells; (panel B) a representative FACS analysis for tetramer positive T cells specific for individual antigenic peptides; and (panel C) bar histograms of average percent tetramer positive population in CD4+ T cells measured after 12-14 days of in vitro peptide stimulation in which each bar indicates the percentage of CD4+ T cells specific for each islet antigenic peptide and in which each dot represents a different experiment.

[0265] FIG. 154 depicts (panel A) a timeline and steps for production of islet-specific edTregs, polyclonal islet-specific Teff, and monocyte-derived DC (mDC) from PBMC and the in vitro suppression assay; (panel B) histograms showing proliferation of polyclonal islet Teff in antigen-specific suppression assay; and (panel C) bar histograms showing percent suppression on proliferation of polyclonal islet Teff by polyclonal edTreg, T1D2 mock, T1D2 edTreg, 4.13 mock, or 4.13 edTreg in the presence of mDC and a pool of 9 islet-specific peptides in which percent suppression was calculated by (% proliferation with no Treg−% proliferation with edTreg)/% proliferation with no Treg×100. **P<0.001, *P<0.05, as determined by paired t-test.

[0266] FIG. 155 depicts (panel A) a graph of proliferation of T cells expressing T1D2, T1D5-1, or T1D5-2 TCR; (panel B) a TABLE listing peptide specificity and avidity of T1D2, T1D5-1, and T1D5-2 TCR; (panel C) histograms of proliferation of T1D5-2 Teff in an antigen-specific suppression assay using T1D2 edTreg or T1D5-1 edTreg; (panel D) bar histograms of percent suppression of T1D5-2 Teff proliferation by T1D2 edTreg or T1D5-1 edTreg in the antigen-specific suppression assay; (panel E) histograms of proliferation of polyclonal islet Teff in antigen-specific suppression assay; and (panel F) bar histograms of percent suppression on proliferation of polyclonal islet Teff by T1D2 edTreg or T1D5-1 edTreg in the presence of mDC and a pool of 9 islet-specific peptides.

[0267] FIG. 156A depicts (panel A) a graph of proliferation of T cells expressing islet-specific TCRs; (panel B) a TABLE summarizing peptide specificity and avidity of islet-specific TCRs; (panel C) histograms (left) of proliferation of polyclonal islet Teff in an antigen-specific suppression assay using T1D2 edTreg or 4.13 edTreg, and bar histograms (right) of percent suppression on proliferation of polyclonal islet Teff by T1D2 edTreg or 4.13 edTreg in the presence of mDC and a pool of 9 islet-specific peptides from three independent experiments using cells generated from three different T1D donors in which statistical significance was determined by paired t-test; (panel D) histograms (left) of proliferation of polyclonal islet Teff in antigen-specific suppression assay using T1D2 edTreg, GAD113 edTreg, or PPI edTregs, and bar histograms (right) of percent suppression on proliferation of polyclonal islet Teff by T1D2 edTreg, GAD113 edTreg, or PPI edTregs; (panel E) histograms (left) of proliferation of polyclonal islet Teff in antigen-specific suppression assay using T1D2 edTreg, T1D4 edTreg, or T1D5-2 edTreg, and bar histograms (right) of percent suppression on proliferation of polyclonal islet Teff by T1D2 edTreg, T1D4 edTreg, or T1D5-2 edTreg.

[0268] FIG. 156B depicts (panel A) a graph of proliferation of T cells expressing islet-specific TCRs; and (panel B) a TABLE summarizing peptide specificity and avidity of islet-specific TCRs.

[0269] FIG. 157 depicts (panel A) a schematic for generation of edTreg cells expressing islet-TCRs; and (panel B) a summary of methods used to assess antigen-specific suppression assays.

[0270] FIG. 158 depicts histograms of FACS analysis of CD4+ T cells transduced with T1D5-1-TCR (T1D5-1 Teff), labeled with CTV and co-cultured with or without EF670-labeled untransduced edTreg (untd edTreg), edTreg expressing T1D5-1 TCR (T1D5-1 edTreg), or T1D5-1 mock cells in the presence of CD3/CD28 activator beads. Upper row histograms show Teff proliferation in response to CD3/CD28 bead activation; and lower row histograms panels show antigen-specific Teff proliferation.

[0271] FIG. 159 depicts (left panel) histograms of Teff proliferation gated on CD3+CD4+ CTV+ EF670− LNGFR−; and (right panel) a graph of percent proliferation of T1D4 Teff cells with no edTreg, T1D4 edTreg, or T1D5-1 edTreg in the presence of APC and IGRP 241+305 peptides.

[0272] FIG. 160 depicts (left panel) depicts a FACS analysis, and (right panel) graphs with regard to TNF, IL-2, or IFN-g production and CD25 expression from T1D4 Teff cells gated on CD4+ CTV+ EF670−.

[0273] FIG. 161 depicts (upper panel) FACS analysis, and (lower panel) with regard to TNF, IL-2, or IFN-g production and CD25 expression from bystander T1D5-2 Teff cells gated on CD4+ CTV+ EF670−.

[0274] FIG. 162 depicts (panel A) histograms of Teff proliferation in TV-labeled T1D5-2 Teff or T1D4 Teff co-cultured with or without EF670-labeled T1D5-1 edTreg or T1D5-2 edTreg in the presence of APC and IGRP 305, IGRP 241, or IGRP 241+305 peptides; panel (B) graphs of percent proliferation of T1D5-1 Teff (top) and T1D4 Teff (bottom); and (panel C) graphs of percent TNF and IL-2 production by T1D5-2 Teff (left) or T1D4 Teff (right).

[0275] FIG. 163 depicts (panel A) histograms of Teff proliferation in response to CD3/CD28 bead activation; and (panel B) histograms show islet-specific T cell proliferation after being co-cultured for four days with no Treg, untd edTreg, T1D2 edTreg, or T1D2 mock cells in the presence of monocyte-derived DC and a pool of 9 islet-specific peptides or DMSO.

[0276] FIG. 164A depicts schematic maps including: (panel A) a full CISC TRAC hijack construct (3354) comprising elements encoding an FRB-IL2RB AA237-551 polypeptide, a full-length TCRb polypeptide, and a TRAV/TRAJ polypeptide; (panel B) a CISC component swap TRAC hijack construct (3363) comprising elements encoding an FKBP-IL2RG polypeptide, a full-length TCRb polypeptide, and a TRAV/TRAJ polypeptide; (panel C) a CISC component swap FOXP3 construct (3362) comprising elements encoding an FRB-IL2RB AA237-551 polypeptide and an FRB polypeptide. FIG. 164B depicts the efficiency of editing T cells using constructs 3363 and 3362 to disrupt endogenous TCR expression, introduce an exogenous TCRb polypeptide and TRAV/TRAJ polypeptide, promote stable FOXP3 expression, and express an FKBP-IL2RG polypeptide, FRB-IL2RB polypeptide, and FRB polypeptide. FIG. 164C depicts the frequency of double-positive cells, expressing FOXP3 and exogenous TCRb, over time after incubation with rapamycin.

[0277] FIG. 165 depicts schematic maps including: (panel A) a T1D4 full CDS CISC order swap construct (3364) comprising elements encoding an FKBP-IL2RG polypeptide, and a T1D4 polypeptide; (panel B) a A2-CAR CISC construct comprising elements encoding an FRB-IL2RB AA237-551 polypeptide, and an A2-CAR polypeptide.

[0278] FIG. 166A illustrates the process of deriving and delivering autologous ex vivo-expanded natural Treg cells or allogeneic umbilical cord blood (UCB)-derived Treg cells to a subject as a Treg therapy. FIG. 166B illustrates HDR-mediated introduction of a FOXP3 expression cassette driven by an MND promoter at the FOXP3 locus.

[0279] FIG. 167 depicts optimization of the expansion of UCB-derived EngTregs generated by HDR-dependent gene editing. Panel A depicts the experimental timeline illustrating the editing of CD4+ cells and the expansion and validation of the resulting EngTregs expressing FOXP3cDNA and LNGFR marker. Panel B depicts the expansion of UCB-derived (n=6) and PBMC-derived (n=5) CD4+ T cells between DO and D4 as shown in A. Cells are stimulated by CD3/CD28 Dynabeads for 3 days and then cultured without them for an additional 16 hours. Significance was determined through an unpaired T test. Panel C depicts the editing efficiency between UCB-derived (n=6) and PBMC-derived (n=5) cells. After RNP delivery using a Lonza 4D nucleofector, 20% v/v AAV was added to cell culture. At 2 days after editing, HDR efficiency was assessed through flow cytometry. Edited cells are represented by the percentage of live, singlet CD4 cells stained positive for LNGFR. Significance was determined through an unpaired T test. Panel D depicts the expansion of the EngTregs cultured in G-rex from UCB and PB over a 7-day period after enrichment for LNGFR.FIG. Panel E depicts the effects of IL-2 concentration and culture device on fold expansion of UCB-derived EngTregs over a 7-day period after enrichment for LNGFR. Panel F depicts the viability of UCB-derived EngTregs cultured in different devices.

[0280] FIG. 168 shows data indicating that UCB-derived EngTregs exhibit Treg phenotypes and reduction in inflammatory cytokine production. Panel A shows representative histograms depicting selected markers expressed in UCB-derived EngTregs after a 7-day expansion. Panel B shows the cytokine production relative to mock-edited cells from UCB-derived LNGFR+ EngTregs (n=5). After resting, cells were stimulated with PMA and Ionomycin in the presence of Golgi-stop for 5 hours before analyzing intracellular cytokine production by flow cytometry.

[0281] FIG. 169 shows that UCB-derived EngTregs suppress allogeneic effect T cells and provide protection against graft-vs-host disease (GvHD). Panel A shows the timeline and study design of in vivo study comparing suppression of allogeneic Teff by PBMC-derived and UCB-derived EngTregs in NSG mice. Panel B shows a survival curve over the duration of the in vivo study. 20% body weight loss is set as the humane study endpoint. Panel C depicts changes in body weight for each mouse between DO and study endpoint.

[0282] FIG. 170A shows the mechanism by which CISC activity is regulated by the presence of rapamycin. FIG. 170B illustrates an AAV donor template for CISC that is introduced upstream of the endogenous FOXP3 gene. FIG. 170C shows relative MFI of indicated Treg markers in UCB-derived EngTregs, compared to the baseline of mock-edited UCB-derived CD4+ cells. FIG. 170D shows cytokine production relative to mock-edited cells from UCB-derived CISC-expressing EngTregs expanded in tissue culture plates. Cells were treated with PMA, ionomycin, and Golgi-stop for 5 hours followed by intracellular staining for indicated cytokines. FIG. 170E shows a flow cytometry plot indicating that UCB-derived CISC-expressing EngTregs express FOXP3 and P2A, indicating production of the CISC components separated by P2A self-cleavage motifs in initial translation. FIG. 170F shows the percentage of UCB-derived CD4+ cells expressing the CISC at day 3, indicating editing efficiency, and at day 17, indicating expansion by rapamycin exposure. FIG. 170G shows the fold expansion by rapamycin treatment of mock-edited UCB-derived EngTregs, or EngTregs expressing a CISC.

[0283] FIG. 171 depicts a timeline and procedure for scale up production of UCB EngTregs.

[0284] FIG. 172A depicts immunophenotypes of LNGFR+ EngTregs from UCB and includes representative histograms depicting selected markers expressed in 2 donors of UCB-derived EngTregs after a 7-day expansion. FIG. 172B depicts bar graphs comparing the cytokine production relative to mock-edited cells from 2 donors of UCB-derived LNGFR+ EngTregs. After resting, cells were stimulated with PMA and Ionomycin in the presence of Golgi-stop for 5 hours before analyzing intracellular cytokine production by flow cytometry.

[0285] FIG. 173A depicts an in vivo assessment of the suppressive capabilities of UCB-derived EngTregs against allogeneic effector T cells (Teff) in a xenogeneic GvHD mouse model, and includes a timeline and study design of in vivo study comparing suppression of allogeneic Teff by PBMC-derived and UCB-derived EngTregs in NSG mice. FIG. 173B depicts a survival curve over the duration of the in vivo study. 20% body weight loss is set as the humane study endpoint. The graph has combined data from both UCB donors. FIG. 173C depicts a graph representing changes in body weight for each mouse between DO and study endpoint. Graph has combined data from two donors.

[0286] FIG. 174 depicts a survival curve of NSG mice in combined xenoGvHD studies. Data presented are combined results of 2 cord blood cell products against 3 different allogeneic PB-derived CD4 Teffs, respectively. Autologous PB derived EngTregs and mocked-edited cells were included as control. P values were calculated using Log-rank (Mantel-Cox) test.

[0287] FIG. 175A depicts gene editing in CD8+ T cells resulting in expression of FOXP3 and conversion of Treg characteristics, and includes a schematic of FOXP3 gene editing in T cells to express MND-driven IL-2 CISC EngTregs. RNP complex containing Cas 9 and FOXP3-specific gRNA was electroporated into T cells followed by AAV transduction. HDR resulted in the allele expressing IL-2 CISC and endogenous FOXP3 driven by MND promoter. FIG. 175B depicts a timeline and key steps to generate IL-2 CISC EngTregs. CD3+ T cells isolated from healthy donors were subjected to gene editing followed by post-editing enrichment and expansion. FIG. 175C depicts a bar graph showing editing efficiency analyzed at day 2 post gene editing. Percent FOXP3+ was analyzed in live singlet CD4+ and CD8+ subsets. FIG. 175D depicts a percent FOXP3+ after enrichment and expansion step as indicated as Day 16 in panel B. FIG. 175E depicts histograms of indicated Treg markers in CD4+ and CD8+ subsets of the cell products. FIG. 175F (left panel) depicts a flow cytometry results of CD8+ mock-edited (top row) cells and EngTregs (bottom row) showing intracellular expression of indicated cytokines in response to PMA and ionomycin stimulation. FIG. 175F (right panel) depicts a graph of relative cytokine positivity compared to mock-edited cells. FIG. 175G depicts a cell trace violet (CTV)-labelled autologous CD4s (left graph) or CD8s (right graph) responders were treated with CD3/CD28 T activator beads at 10:1 bead-to-responder cells and then co-cultured with CD4 or CD8 CISC-EngTregs or mock-edited counterparts at indicated ratios. After a 96-hour incubation, proliferation of CD4+ or CD8+ responders were analyzed by flow cytometry. Percent Suppression=[(% proliferation of responders without suppressors)−(% proliferation of responders with suppressors)]/(% proliferation responders without suppressors)×100.

[0288] FIG. 176 depicts a FACS analysis of CD8+ T cells, and generation of CD8+ CISC EngTregs from purified CD8+ T cells: editing efficiency on day 2 post editing.

[0289] FIG. 177A depicts CD8 CISC EngTregs post rapa enrichment and expansion, and includes a graph for % FOXP3+ cells and time. FIG. 177B depicts a FACS analysis.

[0290] FIG. 178 depicts CD8 CISC EngTregs immunophenotypes in a FACS analysis.

[0291] FIG. 179 depicts CD8 CISC EngTregs cytokine production in a FACS analysis.

[0292] FIG. 180A depicts a timeline for A2CAR EngTregs production.

[0293] FIG. 180B depicts an LV.A2CAR.P2A.LNGFR constructs (LV3350), an AAV3195 construct. FIG. 180C depicts tables listing groups 1-9 for various cells, and schematics for construct 3362 and construct 3407. FIG. 180D depicts a FACS analysis for modified cells.

[0294] FIG. 181 depicts CD3 editing: HDR detection at day 3 post-editing in a FACS analysis.

[0295] FIG. 182 depicts CD3 editing—HDR detection: analysis in CD4/CD8 subsets in a FACS analysis.

[0296] FIG. 183 depicts CD8 editing: HDR analysis in a FACS analysis.

[0297] FIG. 184A depicts TRAC/FOXP3 dual editing with Split CISC and A2CAR and includes a 3362 construct, a 3407 construct. FIG. 185B depicts a FACS analysis with cells modified with the constructs depicts in FIG. 184A.

[0298] FIG. 185 depicts a FACS analysis with FOXP3 dual editing with Split CISC and A2CAR and includes the 3362 and 3407 constructs shown in FIG. 184A.

[0299] FIG. 186A depicts a pRRL_MND.A2CAR.PA2.LNGFR construct for LVA2CAR.CISC EngTregs TCRnull editing. FIG. 186B depicts a FACS analysis with cells modified with the constructs depicts in FIG. 186A.

[0300] FIG. 187 depicts LNGFR affinity selection to enrich A2CAR+ cells in a FACS analysis.

[0301] FIG. 188 depicts an in vivo study and includes a timeline and example groups. The study uses a similar procedure to the CD4 A2CAR in vivo studies disclosed herein in which EngTregs and PBMC together are injected 1 day after irradiation; mix cells immediately prior to injection. If CD3 derived products are used, CD4/CD8 cells are separated before injection. In the groups, ratios: 1:1, 2:1, 4:1 are used. Proposed A2+ PBMC donor: R003791 for first experiment and R003798 for second experiment with same donors used in the CD4 A2CAR LNGFR study.

[0302] FIG. 189 depicts a TABLE including sequences for certain constructs encoding A2 CARs.

[0303] FIG. 190A depicts generation of islet specific EngTregs by FOXP3 HDR-editing and LV TCR transduction and includes a timeline of key steps for generating and enriching islet specific EngTregs from primary human CD4+ T cells. T cells were activated with CD3/CD28 beads on day 0 followed by transduction with lentiviral vectors (encoding islet specific TCRs on day 1). On day 7, flow cytometry was used to assess expression of islet specific TCR and Treg markers (mTCR CD25, CD127 CTLA-4 and ICOS). On day 10, islet specific EngTregs were enriched on LNGFR magnetic beads.

[0304] FIG. 190B depicts a diagram of FOXP3 locus (top); exons are represented by boxes. The AAV 6 donor template (bottom) was designed to insert the MND promoter, truncated LNGFR coding sequence and P2A (2A) sequence. After successful editing, the MND promoter drives expression of LNGFR and FOXP3.

[0305] FIG. 190C depicts representative flow plots (day 7, 4 days post editing) showing co expression of FOXP3 and LNGFR in edited cells (left panel), expression of mTCR, CD25, CD127, CTLA 4 and ICOS gated on LNGFR+ FOXP3+ cells from the left panel.

[0306] FIG. 190D depicts representative flow plots (day 10, 7 days post editing) showing purity of LNGFR+ cells post-enrichment on anti-LNGFR magnetic beads. LNGFR− T cells were also collected to serve as controls for the in vitro suppression assays.

[0307] FIG. 190E depicts TCR expression and antigen specific proliferation of T cells transduced with islet TCR and include a schematic showing structure of lentiviral islet-specific TCR including variable region of human islet-specific TCR (huV-alpha and huV-beta) and constant region of murine TCR (muV-alpha and muV-beta).

[0308] FIG. 190F depicts validation of islet-specific TCR expression in human CD4+ T cells transduced with islet-specific TCRs. CD4+ T cells were isolated, activated with CD3/CD28 beads, and transduced with each lentiviral islet-specific TCR. Flow plots show mTCR expression in CD4+ T cells at 7 days post transduction using an antibody specific for the mouse TCR constant region.

[0309] FIG. 190G depicts proliferation of CD4+ T cells transduced with islet TCR in the presence of APC and their cognate peptide. TCR-transduced CD4+ T cells were labeled with cell trace violet and then co cultured with their cognate peptide (or irrelevant peptide) and APC (irradiated PBMC) for 4 days. Flow plots show cell proliferation as CTV dilution.

[0310] FIG. 191A depicts islet-specific EngTregs suppress antigen-induced Teff proliferation and includes a schematic of direct suppression of Teff by EngTregs with specificity for the same islet antigen. Shown here both the EngTregs and Teff are expressing T1D5-2 TCR, specific for IGRP₃₀₅₋₃₂₄.

[0311] FIG. 191B depicts representative histograms showing proliferation of T1D5-2 Teff (measured by CTV dilution) in the presence of either anti-CD3/CD28 antibody coated beads (top row) or cognate peptide (IGRP₃₀₅₋₃₂₄) and APC (bottom row) and the EF670-labelled EngTregs or controls. Histograms were gated on EF670− cells.

[0312] FIG. 191C depicts percent suppression of CD3/CD28 bead-induced Teff proliferation by poly EngTregs, LNGFR− T cells and islet-specific EngTregs either T1D5-2 (left), PPI76 (middle) or GAD65 (right).

[0313] FIG. 191D depicts percent suppression of antigen-induced Teff proliferation by poly EngTregs, LNGFR− T cells and islet-specific EngTregs either T1D5-2 (left), PPI76 (middle) or GAD65 (right); the cognate peptides were IGRP₃₀₅₋₃₂₄, PPI₇₆₋₉₀ and GAD65₂₆₅₋₂₈₄, respectively. For FIG. 191C and FIG. 191D, data are represented as mean±SD of three independent experiments using cells generated from three different healthy donors. P-values were calculated using a paired two-tailed Student t test (*P<0.05 and **P<0.01).

[0314] FIG. 191E depicts a timeline and key steps for production of islet specific EngTregs and Teff and the in vitro suppression assay. Teff were generated by TCR transduction of CD4+ T cells after activation with CD3/CD28 beads. Teff were expanded and harvested at day 15. Procedure for EngTregs production is described in FIG. 109A. Teff were co-cultured with or without EngTregs or LNGFR T cells in the presence of either APC (irradiated autologous PBMC) and various peptides or in the presence of CD3/CD28 beads. Teff and EngTregs or LNGFR− T cells were labeled with cell trace violet (CTV) and EF670 respectively, prior to co-culture. After 3 or 4 days of incubation, cells were harvested, stained, and analyzed by flow.

[0315] FIG. 192A depicts islet-specific EngTregs suppress antigen-induced Teff cytokine production and includes representative flow plots showing Teff cytokine production (TNF-alpha, IL-2 and IFNγ) and activation (CD25 expression) in an antigen-specific suppression assay. T1D5-2 Teff in the presence of T1D5-2 cognate peptide IGRP₃₀₅₋₃₂₄ and APC were cultured alone or with polyclonal EngTregs, LNGFR− T cells, or T1D5-2 EngTregs.

[0316] FIG. 192B depicts percent suppression of antigen-induced T1D5-2 Teff production of TNFα (left) IL-2 (middle) and IFNγ (right) by poly EngTregs LNGFR− T cells and islet-specific T1D5-2 EngTregs.

[0317] FIG. 192C depicts percent suppression of antigen-induced T1D5-2 Teff expression of CD25 by poly EngTregs, LNGFR− T cells and islet-specific T1D5-2 EngTregs. For FIG. 192B and FIG. 192C, data are represented as mean±SD of four independent experiments using cells generated from four different healthy donors. P values were calculated using a paired two tailed Student t test (*P<0.05, **P<0.01 and ***P<0 001).

[0318] FIG. 193A depicts islet-specific EngTregs suppress bystander Teff proliferation and includes a schematic of bystander suppression of Teff by EngTregs with specificity for different islet antigens. Shown here the EngTregs expresses T1D4 TCR specific for IGRP₂₄₁₋₂₆₀, and the Teff express T1D5-2 TCR specific for IGRP₃₀₅₋₃₂₄.

[0319] FIG. 193B depicts representative histograms showing proliferation of T1D5-2 Teff (measured by CTV dilution) in the presence of either IGRP₃₀₅₋₃₂₄ peptide (top panel) or mixture of IGRP₃₀₅₋₃₂₄ and IGRP₂₄₁₋₂₆₀ peptides (bottom row) plus APC and either T1D5-2 EngTregs, T1D4 EngTregs or poly EngTregs. EngTregs were labeled with EF670 and histograms were gated on EF670− cells.

[0320] FIG. 193C depicts percent suppression of T1D5-2 Teff proliferation by poly EngTregs, T1D5-2 EngTregs or T1D4 EngTregs in the presence of a mixture of IGRP₃₀₅₋₃₂₄ and IGRP₂₄₁₋₂₆₀ peptides plus APC.

[0321] FIG. 193D depicts representative histograms showing proliferation of T1D5-2 Teff (measured by CTV dilution) in the presence of either IGRP₃₀₅₋₃₂₄ peptide (top panel) or mixture of IGRP₃₀₅₋₃₂₄ and GAD₂₆₅₋₂₈₄ peptides (bottom row) plus APC and poly EngTregs and GAD265 EngTregs. EngTregs were labeled with EF670 and histograms were gated on EF670− cells.

[0322] FIG. 193E depicts percent suppression of proliferation of T1D5-2 Teff by poly EngTregs or GAD265 EngTregs in the presence of APC and mixture of IGRP₃₀₅₋₃₂₄ and GAD₂₆₅₋₂₈₄ peptides plus APC.

[0323] FIG. 193F depicts percent suppression of T1D5-2 Teff cytokine production by T1D5-2 Teff by poly EngTregs, T1D5-2 EngTregs or T1D4 EngTregs in the presence of APC and mixture of IGRP₃₀₅₋₃₂₄ and IGRP₂₄₁₋₂₆₀ peptides.

[0324] FIG. 193G depicts percent suppression for T1D5-2 Teff CD25 expression by poly EngTregs, T1D5-2 EngTregs or T1D4 EngTregs in the presence of APC and mixture of IGRP₃₀₅₋₃₂₄ peptide and IGRP₂₄₁₋₂₆₀ peptide. For FIG. 193C, FIG. 193E, FIG. 193F and FIG. 193G, data are provided as the mean±SD of three independent experiments using cells generated from three different healthy donors. P values were calculated using a paired two tailed Student t test (*P<0.05, P<0.01 and P<0.005). LNGFR− T cells with either T1D5-2 TCR or T1D4 TCR were used as a negative control for all three experiments and did not show any significant suppression.

[0325] FIG. 193H depicts islet-specific EngTregs show comparable suppression on CD3/CD28 bead induced Teff proliferation and includes representative flow plots showing mTCR expression in FOXP3-edited cells transduced with no TCR (−), T1D4 TCR or T1D5-2 TCR. Edited cells were stained at day 7 and were gated on Live, CD3+, CD4+, LNGFR+, FOXP3+.

[0326] FIG. 193I depicts representative histograms showing proliferation of T1D5-2 Teff in CD3/CD28 bead suppression assay performed in parallel with bystander suppression assay in FIG. 193B and FIG. 193C. T1D5-2 Teff were incubated with CD3/CD28 beads with no Treg (−), polyclonal EngTregs, T1D5-2 EngTregs, or T1D4 EngTregs.

[0327] FIG. 193J depicts percent suppression of CD3/CD28 bead induced-T1D5-2 Teff proliferation by poly EngTregs, T1D5-2 EngTregs, or T1D4 EngTregs in (FIG. 193I).

[0328] FIG. 193K depicts representative histograms showing T1D5-2 Teff proliferation in CD3/CD28 bead suppression assay performed in parallel with bystander suppression assay in FIG. 193D and FIG. 193E. T1D5-2 Teff were incubated with CD3/CD28 beads with no Treg (−), poly EngTregs, or GAD265 EngTregs.

[0329] FIG. 193L depicts percent suppression of CD3/CD28 bead induced-T1D5-2 Teff proliferation by poly EngTregs or GAD265 EngTregs in FIG. 193K. For FIG. 193J and FIG. 193L, data are represented as the mean±SD of three independent experiments using cells generated from three different healthy donors. P-values were calculated using a paired two-tailed Student t test.

[0330] FIG. 193M depicts representative histograms showing islet specific EngTregs suppression of bystander Teff cytokine production and includes representative histograms showing T1D5-2 Teff production of TNFα in antigen-specific bystander suppression assay. Columns are the same as those labelled in FIG. 193M.

[0331] FIG. 193N depicts representative histograms showing T1D5-2 Teff production of IL2 in antigen-specific bystander suppression assay. Columns are the same as those labelled in FIG. 193M.

[0332] FIG. 193O depicts representative histograms showing T1D5-2 Teff production of IFNγ in antigen-specific bystander suppression assay. Columns are the same as those labelled in FIG. 193M.

[0333] FIG. 193P depicts representative histograms showing T1D5-2 Teff expression of CD25 in antigen-specific bystander suppression assay. Columns are the same as those labelled in FIG. 193M. For FIGS. 193M-193P, T1D5-2 Teff were co-cultured with no Treg poly EngTregs, T1D5-2 EngTregs or T1D4 EngTregs in the presence of APC and either IGRP₃₀₅₋₃₂₄ peptide alone or a mixture of IGRP₃₀₅₋₃₂₄ and IGRP₂₄₁₋₂₆₀ peptides.

[0334] FIG. 194A depicts islet-specific EngTregs suppress polyclonal islet-specific Teff derived from T1D PBMC, and includes a timeline and key steps for production of islet-specific EngTregs, polyclonal islet specific Teff, and monocyte derived DC (mDC) from PBMC from T1D donor, and the in vitro suppression assay.

[0335] FIG. 194B depicts representative histograms showing proliferation of polyclonal islet Teff (measured by CTV dilution) in the presence of either CD3/CD28 beads (top panel) or islet-specific antigens (9 islet specific peptides monocyte derived DC (mDC)) (bottom row) and either T1D2 EngTregs, 4.13 EngTregs, LNGFR− T cells or poly EngTregs. EngTregs were labeled with EF670 and histograms were gated on EF670− cells

[0336] FIG. 194C depicts percent suppression of CD3/CD 28 induced proliferation of polyclonal islet Teff by T1D2 EngTregs, 4.13 EngTregs, LNGFR− T cells or poly EngTregs.

[0337] FIG. 194D depicts percent suppression of antigen-induced proliferation of polyclonal islet Teff by T1D2 EngTregs, 4.13 EngTregs, LNGFR− T cells or poly EngTregs. Antigen stimulation by pool of 9 islet specific peptides in the presence of mDC. Data are provided as the mean±SD of three independent experiments using cells generated from three different T1D donors. P values were calculated using a paired two-tailed Student t test (* P<0.05 **P<0.01 and ***P<0.0001). Co-culture in the presence of mDC and DMSO was included as a negative control and showed no significant proliferation of Teff.

[0338] FIG. 194E depicts expansion of islet-specific T cells of multiple specificities derived from T1D PBMC, and includes a timeline and key steps of peptide stimulation to expand islet-specific T cells. CD4+CD25− T cells isolated from T1D donor were stimulated with HLA-DR0401 restricted 9 islet peptides specific for GAD65 (5), IGRP (3), and PPI (1) and irradiated autologous APC (CD4−CD25+) followed by tetramer staining at day 12 to 14. T cells were cultured without IL-2 until day 7, and then expanded with IL-2 at 2-3 days of interval.

[0339] FIG. 194F depicts representative flow plots showing tetramer+ T cells specific for individual antigenic peptides. Staining with no tetramer was included as a negative staining result. Cells were gated on CD4+ T cells and each percentage indicates the level of tetramer staining above background.

[0340] FIG. 194G depicts percent tetramer+ population in CD4+ T cells measured and combined from 5 different experiments using 3 different T1D donors after 12-14 days of in vitro peptide stimulation. Each bar indicates the percentage of CD4+ T cells specific for each islet antigenic peptide. Each dot represents a different experiment.

[0341] FIG. 194H depicts islet-specific EngTregs are superior at suppressing polyclonal islet-specific Teff than tTreg, and includes representative histograms showing proliferation of polyclonal islet Teff in the presence of either anti-CD3/CD28 antibody coated beads (Top row) or mDC and a pool of 9 islet-specific peptides (Bottom row) performed in parallel. Polyclonal islet Teff were cultured with no Treg (−), T1D2 LNGFR−, T1D2 EngTregs, or tTreg. tTreg were sorted by CD4+CD25+CD127− and cultured in the same way as EngTregs. tTreg were activated with CD3/CD28 beads for 2 days, expanded, and harvested at day 10. All the cells used for suppression assays are autologous and prepared from a T1D donor. Co-culture in the presence of monocyte-derived DC (mDC) and DMSO was included as a negative control and showed no significant proliferation of Teff.

[0342] FIG. 194I depicts percent suppression of CD3/CD28 bead induced-proliferation of polyclonal islet Teff by T1D2 LNGFR−, T1D2 EngTregs, or tTreg.

[0343] FIG. 194J depicts percent suppression of antigen induced-proliferation of polyclonal islet Teff by T1D2 LNGFR−, T1D2 EngTregs, tTreg.

[0344] FIG. 195A depicts islet specific EngTregs inhibit APC maturation and utilize both cell contact dependent and independent mechanisms to suppress Teff, and include a schematic of transwell suppression assay: upper and lower chamber separated by permeable membrane.

[0345] FIG. 195B depicts percent suppression of proliferation of polyclonal islet specific Teff measured by CTV dilution in lower chamber (left panel) or upper chamber (right panel). Polyclonal islet Teff were co cultured with T1D2 EngTregs as a positive control. Data are provided as the mean±SEM of three independent experiments using cells generated from three different T1D donors. ***P<0.001, **P<0.01, *P<0.05, as determined by paired t-test.

[0346] FIG. 195C depicts a timeline and key steps for DC maturation and APC modulation assay.

[0347] FIG. 195D depicts normalized CD86 MFI on mDC. Autologous matured mDC with HLA DR0401 were co cultured with T1D2 EngTregs or LNGFR− T cells in the presence of IGRP₃₀₅₋₃₂₄ peptide for 2 days. MFI of CD86 on DCs were normalized by MFI of DC only condition. Data are provided as the mean SD of three independent experiments using cells generated from three different healthy donors. *P<0.05, as determined by paired t-test.

[0348] FIG. 195E depicts representative histograms showing proliferation of polyclonal islet-specific Teff co-cultured with islet specific antigens (10Ags including IGRP₃₀₅₋₃₂₄) and mDC in the presence of T1D2 EngTregs with addition of exogenous human IL2 (0.1 IU/ml). Teff and EngTregs were labeled with CTV and EF670, respectively, before the co-culture and CTV dilution was measured as proliferation.

[0349] FIG. 195F depicts percent suppression on Teff proliferation shown in FIG. 195E. % Suppression was calculated separately in the absence or presence of exogenous human IL2. Data are provided as the mean±SEM of three independent experiments using cells generated from three different T1D donors. Ns, not significant, as determined by paired t-test.

[0350] FIG. 195G depicts islet-specific EngTregs show both contact dependent and independent bystander suppression, and includes generation of polyclonal islet-specific Teff to investigate mechanisms for bystander suppression by islet specific EngTregs. CD4+ CD25− T cells isolated from T1D donor were stimulated with HLA-DR0401 restricted 9 islet peptides specific for GAD65₁₁₃₋₁₃₂, GAD₂₆₅₋₂₈₄, GAD₂₇₃₋₂₉₂, GAD₃₀₅₋₃₂₄, IGRP₁₇₋₃₆, IGRP₂₄₁₋₂₆₀, PPI₇₆₋₉₀, ZNT8₂₆₆₋₂₈₅ and irradiated autologous APC (CD4−CD25+) followed by tetramer staining at day 14 or 15. T1D2 TCR specific IGRP₃₀₅₋₃₂₄ peptide was excluded for Teff expansion. Representative flow plots showing tetramer T cells specific for individual antigenic peptides. Staining with no tetramer was included as a negative staining result. Cells were gated on CD4+ T cells and each percentage indicates the level of tetramer staining above background.

[0351] FIG. 195H depicts percent tetramer population in CD4+ T cells measured and combined from 3 different T1D donors after 14-15 days of in vitro peptide stimulation. Each bar indicates the percentage of CD4+ T cells specific for each islet antigenic peptide. Each dot represents a different T1D donor.

[0352] FIG. 195I depicts representative histograms showing proliferation of polyclonal islet-specific Teff at lower well (top) or upper well (lower). mDC loaded with a pool of islet peptides (10 Ags including IGRP₃₀₅₋₃₂₄) were plated in both lower and upper well. Polyclonal islet-specific Teff or/and T1D2 EngTregs were added in lower or/and upper well as indicated.

[0353] FIG. 195J depicts islet-specific EngTregs inhibit CD86 expression on dendritic cells, and includes autologous monocytes restricted to HLA-DR0401 were matured into DC with GM-CSF/IL-4 and IFNg/CL075. Matured DC were co-cultured with CTV-labeled EngTregs or LNGFR− T cells expressing islet-TCR in the presence of cognate peptide. After 2 days of incubation, cells were harvested, stained, analyzed by flow.

[0354] FIG. 195K depicts representative data showing MFI of CD86 on DC co-cultured with T1D2 EngTregs or LNGFR− T cells.

[0355] FIG. 195L depicts bar histograms showing normalized expression level of CD86 on DC co-cultured with T1D4 EngTregs or LNGFR− T cells in the presence of IGRP₂₄₁-260 peptide (left) or with PPI76 EngTregs or LNGFR− T cells in the presence of PPI₇₆₋₉₀ peptide (right).

[0356] FIG. 196A depicts islet-specific EngTregs with low functional avidity exhibit superior suppression of polyclonal islet-specific Teff derived from T1D PBMC, and includes a graph showing peptide dose response of T cells expressing T1D2, T1D5-1, or T1D5-2 TCR. CD4+ T cells transduced with T1D2, T1D5-1 or T1D5-2 TCR were co-cultured with APC in the presence of various concentration of their cognate peptide, IGRP₃₀₅₋₃₂₄ for 4 days. T cells were labeled with CTV before the co-culture and cell proliferation was measured by CTV dilution.

[0357] FIG. 196B depicts representative histograms showing proliferation of polyclonal islet Teff in the presence of islet-specific antigens (10 islet-specific peptides+monocytederived DC (mDC)) and either T1D2, T1D5-1, or T1D5-2 EngTregs. Polyclonal islet Teff and EngTregs were labeled with CTV and EF670, respectively and cell proliferation was measured as CTV dilution.

[0358] FIG. 196C depicts percent suppression of antigen-induced proliferation of polyclonal islet Teff by T1D2, T1D5-1, or T1D5-2 EngTregs. Data are normalized by suppressive activity obtained from suppression assay setup in parallel using CD3/CD28 beads. Suppressive activity was calculated as (% suppression/% the lowest suppression). Normalization of antigen-specific suppression was calculated as (% suppression from antigen-specific assay/suppressive activity).

[0359] FIG. 196D depicts generation of polyclonal islet specific Teff derived from T1D PBMC, and includes CD4+ CD25− T cells isolated from T1D donor were stimulated with HLA-DR0401 restricted 10 islet peptides specific for GAD65₁₁₃₋₁₃₂, GAD₂₆₅₋₂₈₄, GAD₂₇₃₋₂₉₂, GAD₃₀₅₋₃₂₄, IGRP₁₇₋₃₆, IGRP₂₄₁₋₂₆₀, PPI₇₆₋₉₀, ZNT8₂₆₆₋₂₈₅ and irradiated autologous APC (CD4−CD25+) followed by tetramer staining at day 14 or 15. Representative flow plots showing tetramer+ T cells specific for individual antigenic peptides. Staining with no tetramer was included as a negative staining result. Cells were gated on CD4+ T cells and each percentage indicates the level of tetramer staining above background.

[0360] FIG. 196E depicts percent tetramer population in CD4+ T cells measured and combined from 5 different experiments using 4 different T1D donors after 14-15 days of in vitro peptide stimulation. Each bar indicates the percentage of CD4+ T cells specific for each islet antigenic peptide. Each dot represents a different T1D donor.

[0361] FIG. 196F depicts normalization of antigen-specific suppression of polyclonal islet Teff, and includes representative histograms showing proliferation of polyclonal islet Teff in the presence of anti-CD3/CD28 antibody coated beads or mDC and a pool of 9 islet-specific peptides (Bottom row) performed in parallel in the presence of mDC and a pool of 10 islet-specific peptides shown in FIG. 196B and FIG. 196C.

[0362] FIG. 196G depicts percent suppression of CD3/CD28 bead induced-proliferation of polyclonal islet Teff by T1D2, T1D5-1, or T1D5-2 EngTregs shown in FIG. 196F.

[0363] FIG. 197A depicts generation of murine islet-specific EngTregs by gene editing in BDC2.5 CD4+ T cells and includes a diagram of AAV 5 packaged, MND LNGFR p2A knock-in donor template for use in FOXP3 HDR editing. Exons are represented by numbered boxes, FOXP3 homology arms are indicated. After successful editing, the MND promoter drives expression of endogenous murine FOXP3 protein and cis-linked LNGFR surface expression.

[0364] FIG. 197B depicts a schematic showing the experimental timeline for FOXP3 gene editing, cell analysis, and enrichment of edited LNGFR cells.

[0365] FIG. 197C depicts representative flow plots (from one of four independent experiments) showing LNGFR expression in mock-edited control cells (left) and cells edited with RNP and AAV donor template pre- (middle) and post- LNGFR+ column-enrichment (right).

[0366] FIG. 197D depicts representative flow cytometry histogram (from one of two independent experiments) showing the expression of Treg associated markers for the indicated cell populations.

[0367] FIG. 197E depicts bar graphs showing MFI for Treg associated markers on EngTregs, or mock edited cells. Error bars show±SD. P values were calculated using an unpaired T test comparing EngTregs and mock edited cells.

[0368] FIG. 197F depicts a schematic of in vitro suppression assays performed using BDC2.5 CD4+ Teff cells and mock control, BDC2.5 tTreg or EngTregs cells.

[0369] FIG. 197G depicts representative flow plots (from one of three independent experiments) showing CTV labeled BDC2.5 CD4+ Teff co-cultured with the indicated cells 4 days post stimulation.

[0370] FIG. 197H depicts a graph showing the percent suppression of BDC2.5 CD4+ Teff proliferation by the indicated Treg co culture at varying ratios of Teff Treg suppression 100 normalized suppression] normalized suppression 100/proliferation of Teff only condition×Teff proliferation in the presence of Treg.

[0371] FIG. 198A depicts islet specific, but not polyclonal, EngTregs prevent T1D onset in vivo, and includes a schematic showing the experimental timeline for murine diabetes prevention studies.

[0372] FIG. 198B depicts a graph showing diabetes-free survival of recipient NSG mice after infusion of islet-specific Teff in the presence of the indicated co-transferred cell populations. Data are combined from two independent experiments; ****, P<0.0001, calculated using a log rank (Mantel-Cox) test comparing the BDC2.5 tTreg or EngTreg groups vs. the mock-edited control group.

[0373] FIG. 198C depicts at left panel including representative flow plots of lymphocytes isolated from the pancreas in diabetes-free NSG recipient mice on day 49 after BDC2.5 CD4 Teff infusion. Upper and lower panels show data for recipients of BDC2.5 tTreg vs. BDC2.5 EngTreg, respectively. Predecessor gates for flow panels are indicated at the top of each column. Right panel, histograms show FOXP3 expression within the indicated (color coded) flow gates.

[0374] FIG. 198D depicts representative flow plots showing LNGFR expression in the indicated (top of column) edited CD4 T cells derived from NOD (polyclonal; top row) and NOD BDC2.5 mice (islet specific; bottom row).

[0375] FIG. 198E depicts a graph showing diabetes-free survival in recipient NSG mice following infusion of islet specific Teff in the presence co transferred mock edited, or polyclonal or islet specific EngTregs or tTreg cells. Combined data from two independent experiments are shown; ****P<0.0001, determined using the Mantel Cox log rank test comparing BDC2.5 tTreg or EngTregs vs. polyclonal tTreg or EngTregs, respectively. All flow plots are representative of at least two independent experiments.

### DETAILED DESCRIPTION

[0376] Provided herein are compositions and methods for editing of more than one genomic locus in a cell using a chemical-inducible signaling complex (CISC) system, editing the TRAC locus of a cell's genome (including promoter capture methods, TCR/CAR knock-in methods, and methods of hijacking the TRAC gene with a promoter). Also provided herein are compositions and methods for suppressing proliferation of T effector cells using genetically modified/engineered airT cells, and methods of treating an autoimmune, allergic, and/or inflammatory disease in a subject using genetically modified/engineered airT cells. Methods for designing TCRs of particular properties, e.g., particular avidity are also provided here.

### Editing of More than One Genetic Locus in a Cell Using a Chemical-Inducible Signaling Complex (CISC) System

[0377] Some embodiments of the methods and compositions provided herein relate to efficient editing of more than one genetic locus in a cell using a chemical-inducible signaling complex (CISC) system. In some embodiments, a CISC complex comprises a first CISC component comprising a first extracellular binding domain, a transmembrane domain, and a first signaling domain; and a second CISC component comprising a second extracellular binding domain, a transmembrane domain, and a second signaling domain, such that the first and second CISC components (e.g., via the first and second extracellular binding domains) are capable of binding a CISC inducer molecule (e.g., a small molecule such as rapamycin or its analogs). In some embodiments, a CISC complex system comprises a CISC complex comprising a first and second CISC component and further a third CISC component that is different from the first and second CISC components and is capable of specifically binding to the CISC inducer molecule. In some embodiments, the third CISC component is soluble and does not comprise a transmembrane domain or an extracellular domain. In some embodiments, the soluble third CISC component does not comprise a secretory peptide and is localized in the cytoplasm of the cell. In some embodiments, the first extracellular binding domain comprises FKBP, the second extracellular binding domain comprises FRB. In some embodiments, the third CISC component comprises soluble or cytosolic FRB. Co-expression of two (e.g., a first and second) transmembrane CISC components that are capable of dimerizing in the presence of a CISC inducer molecule (e.g., rapamycin or a rapalog) is useful for controlling signal transduction by providing the dimerizing molecule. However, inducer molecules may also exert undesired effects on cellular metabolism. For example, intracellular rapamycin can bind to a free FKBP protein, and an FKBP-rapamycin complex can then stimulate the mechanistic target of rapamycin (mTOR), which inhibits mRNA translation and cellular growth. Expression of a third CISC component, such as soluble FRB, in the cytoplasm, allows the third CISC component to serve as a decoy receptor for rapamycin or other CISC inducer molecules, thereby preventing or reducing undesired effects of the CISC inducer molecule on cellular physiology. CISC components and methods useful in embodiments of the cells and methods provided herein are provided in WO 2019/210057, which is incorporated by reference herein in its entirety.

[0378] In some embodiments, a first polynucleotide comprises a nucleic acid encoding a first CISC component as provided herein. In some embodiments, a second polynucleotide comprises a nucleic acid encoding a second CISC component as provided here. In some embodiments, a third polynucleotide comprises a nucleic acid encoding a third CISC component as provided herein. In some embodiments, a first polynucleotide comprising a nucleic acid encoding a first CISC component further comprises a first regulatory element (e.g., a first promoter). In some embodiments, a second polynucleotide comprising a nucleic acid encoding a second CISC component further comprises a second regulatory element (e.g., a second promoter). In some embodiments, a first polynucleotide comprising a nucleic acid encoding a third CISC component further comprises a third regulatory element (e.g., a third promoter). In some embodiments, a polynucleotide comprising nucleic acid encoding a first, second and/or third components does not comprise any regulatory elements, and relies on or is functionally linked to one or more genomic regulatory elements upon insertion into the genome. In some embodiments, the first and second, first and third, second and third, or first, second and third CISC components can be inserted into the same locus. In some embodiments, the first and second, first and third, second and third, or first, second and third CISC components can be on the same polynucleotide. In some embodiments, the first and second polynucleotides are the same and comprise both the nucleic acid encoding the first CISC component and the nucleic acid encoding the second CISC component. In some embodiments, the first and third polynucleotides are the same and comprise both the nucleic acid encoding the first CISC component and the nucleic acid encoding the third CISC component. In some embodiments, the second and third polynucleotides are the same and comprise both the nucleic acid encoding the second CISC component and the nucleic acid encoding the third CISC component. In some embodiments, a polynucleotide comprising nucleic acids encoding first and second CISC components also comprises a nucleic acid encoding a third CISC component as provided herein. In some embodiments, any two or three of the first, second, and third CISC components share a common or are functionally linked to the same regulatory element.

[0379] In some embodiments, a first CISC component and the second CISC component are configured such that when expressed in a cell, they are capable of dimerizing in the presence of an inducer molecule (e.g., rapamycin or a rapalog) to generate a signaling-competent CISC.

[0380] In some embodiments, a method of editing more than one genetic loci (e.g., a first locus and a second locus) in a cell comprises providing to a cell any or all of: a first polynucleotide comprising a nucleic acid encoding a first CISC component (and optionally a third CISC component) as provided herein such that the first polynucleotide is inserted in the first locus; and a second polynucleotide comprising a nucleic acid encoding a second CISC component (and optionally a third CISC component) as provided herein such that the second polynucleotide is inserted in the second locus. In some embodiments, first and second CISC components (and optionally the third CISC components) are comprised on the same polynucleotide and are inserted in the same locus (e.g., the Foxp3 gene/locus or the TRAC gene or locus/gene). A particular locus may be targeted by designing endonucleases that cut at a particular location and by inserting sequences (e.g., homology arms) that flank one or more nucleic acids that encode a CISC component. It is to be understood, that more than two loci can be edited using the methods disclosed herein by insertion of one or more of any one of the first, second, and third CISC components provided herein.

[0381] In some embodiments, a method of editing one or more genetic/genomic loci in a cell comprises: (a) contacting the cell with (i) a first nucleic acid comprising a polynucleotide encoding a first CISC component comprising a first extracellular binding domain, first transmembrane domain, and first intracellular signaling domain (ii) a second nucleic acid comprising a second polynucleotide encoding a second CISC component comprising a second extracellular binding domain, a transmembrane domain, and a second intracellular signaling domain, (iii) a first endonuclease, or nucleic acid encoding the first endonuclease, that can cleave a first nucleotide sequence within a first locus, (iv) a second endonuclease, or nucleic acid encoding the second endonuclease, that can cleave a second nucleotide sequence within a second locus, such that the first polynucleotide or fragment thereof is incorporated into the first locus, and the second polynucleotide or fragment there is is inserted in the second locus; and (b) contacting the cells with a dimerization agent (e.g., a ligand) that binds to the first extracellular binding domain of the first CISC component and the second extracellular binding domain of the second CISC component, such that the first intracellular signaling domain and second intracellular signaling domain dimerize in cells expressing both the first CISC component and the second CISC component, resulting in signal transduction through interactions between the first and second intracellular signaling domains. In some embodiments, a first polynucleotide further comprises homology arms targeting a first locus. In some embodiments, a second polynucleotide further comprises homology arms targeting a second locus. In some embodiments, the first CISC component comprises an FKBP extracellular domain, a transmembrane domain, and an IL2RB intracellular signaling domain, and the second CISC component comprises an FRB extracellular domain, a transmembrane, and an IL2RG intracellular signaling domain, wherein the first and second CISC components dimerize in the presence of rapamycin or a rapalog, allowing the cell to respond to rapamycin in a manner similar to IL-2 stimulation. In some embodiments, the first CISC component comprises an FKBP extracellular domain, a transmembrane domain, and an IL2RG intracellular signaling domain, and the second CISC component comprises an FRB extracellular domain, a transmembrane, and an IL2RB intracellular signaling domain, wherein the first and second CISC components dimerize in the presence of rapamycin or a rapalog, allowing the cell to respond to rapamycin in a manner similar to IL-2 stimulation. In some embodiments, a transmembrane domain of CISC component comprises a transmembrane domain corresponding to the transmembrane domain of the intracellular signaling domain of the CISC component (e.g., a CISC component comprising an IL2RB intracellular domain comprises a transmembrane domain derived from IL2RB). In some embodiments, both the first and second CISC components comprise a transmembrane domain derived from the same protein (e.g., IL2RB). In some embodiments, the transmembrane domain of a CISC component is derived from a different protein than the intracellular signaling domain of the CISC component (e.g., a CISC component comprising an IL2RB intracellular signaling domain comprises a transmembrane domain that is not derived from a full-length IL2RB protein).

[0382] The extracellular domains of CISC components can be any domains that can dimerize upon binding to an agent. Such an agent may be a small molecule (e.g., rapamycin) or a protein (e.g., lysozyme), or any other agent. The extracellular domains may be domains that bind to a small molecule, or to a protein, e.g., antibody binding domains or fragments thereof that dimerize upon binding to the ligand.

[0383] In some embodiments, the first locus is a FOXP3 locus, and the second locus is a TRAC locus. In other embodiments, the first locus is a TRAC locus, and the second locus is a FOXP3 locus. In some embodiments, the first and second loci are independently selected from a FOXP3 locus, a TRAC locus, an AAVS1 locus, and a ROSA26 locus. In some embodiments, both nucleic acid molecules are inserted into different alleles of the same locus, which is selected from a FOXP3 locus, a TRAC locus, an AAVS1 locus, and a ROSA26 locus.

[0384] In some embodiments, a method further comprises separating cells that bind to the ligand to a greater extent that other cells. In some embodiments, the first polynucleotide further comprises one or more regulatory elements and/or a first payload. In some embodiments, a first polynucleotide encodes a first CISC component and a regulatory element but not a payload. A payload, as described herein, is a protein or RNA encoded by a nucleic acid. In some embodiments, the second polynucleotide further comprises one or more regulatory elements and/or a nucleic acid encoding a second payload. In some embodiments, (i) a first polynucleotide comprises an MND promoter operably linked to a nucleic acid encoding (a) a first CISC component comprising an FRB extracellular domain, a transmembrane domain, and an IL2RB intracellular signaling domain, and (b) a third CISC component comprising a soluble FRB domain, wherein the MND promoter is inserted upstream of the first coding exon or first codon of the endogenous FOXP3 gene, and downstream of (e.g., 10 to 10,000 bp downstream from) a TSDR in the endogenous FOXP3 locus of the cell; and (ii) a second polynucleotide comprises an MND promoter operably linked to a nucleic acid encoding (a) a second CISC component comprising an FKBP extracellular domain, a transmembrane domain, and an IL2RG intracellular domain, (b) an exogenous TCRβ, and (c) an exogenous TRAV and TRAJ amino acid sequences, wherein the second nucleic acid is inserted into the TRAC locus upstream from nucleic acid encoding the TCRα constant region amino acid sequence, wherein the inserted MND promoter is controls transcription of the exogenous TCRβ and a TCRα comprising the exogenous TRAV and TRAJ amino acid sequences and the endogenous TCRα amino acid sequences. In some embodiments, the first and/or second endonuclease or nucleic acid encoding them are provided, along with one or more gRNAs to target the first and/or second locus. In some embodiments, an endonuclease is an RNA-guided nuclease. In some embodiments, an RNA-guided nuclease is a CRISPR/Cas nuclease. In some embodiments, a CRISPR/Cas nuclease is a Type I Cas nuclease. In some embodiments, a CRISPR/Cas nuclease is a Type II Cas nuclease. In some embodiments, a CRISPR/Cas nuclease is a Type III Cas nuclease. In some embodiments, a CRISPR/Cas nuclease is a Type V Cas nuclease. In some embodiments, the CRISPR/Cas nuclease is selected from the group consisting of Cas9, SaCas9, CjCas9, xCas9, C2C1, Casl3a/C2c2, C2c3, Casl3b, Cpf1, and variants thereof.

[0385] In some embodiments, a first and/or second polynucleotide as described herein further comprises a payload or nucleic acid encoding a polypeptide or a functional fragment thereof. Non-limiting examples of a payload or nucleic acid encoding a polypeptide or a functional fragment thereof include a TCR, CAR, Foxp3 or a functional fragment thereof. In some embodiments, a first and/or second polynucleotide comprises one or more regulatory elements (e.g., one or more promoters). In some embodiments, a first and/or second polynucleotide comprises one or more regulatory elements (e.g., one or more promoters) without comprising a payload or nucleic acid encoding a polypeptide or a functional fragment thereof (unless the nucleic acid encoding a polypeptide constitutes a targeting sequence or homology arm used to target a particular locus in a genome). For example, a targeting sequence or homology arm may be a Foxp3 targeting arms that comprises a nucleic acid encoding and exon of Foxp3, but that does not actually require that the coding region or functional fragment of a FOXP3 gene. In some embodiments, a first and/or second polynucleotide as described herein further comprises a payload or nucleic acid encoding a polypeptide or a functional fragment thereof, and one or more regulatory elements. For example, a first polynucleotide may comprise a nucleic acid encoding a first CISC component (and optionally a third CISC component as described herein) and a promoter (e.g., MND promoter) for insertion into a first locus (e.g., Foxp3 locus), and a second polynucleotide may comprise a nucleic acid encoding a second CISC component (and optionally a third CISC component as described herein) and a nucleic acid encoding a polypeptide or a functional fragment thereof (e.g., a TCR or a CAR) for insertion into a second locus (e.g., TRAC locus). In some embodiments, more than one payload is delivered to one or more loci. For example, a nucleic acid encoding Foxp3 or comprising only a regulatory element (e.g., a promoter) without a nucleic acid encoding Foxp3 may be inserted into the Foxp3 locus and a nucleic acid encoding a TCR or CAR may be inserted in the TRAC locus. It should be understood that any gene or any locus may be used in any one of the methods disclosed herein that comprise insertion of one or more polynucleotides comprising nucleic acid encoding any one or more of a first, second, or third CISC component.

[0386] In some embodiments, a FOXP3 locus/gene and TRAC locus/gene is in a cell, e.g., a T cell. In some embodiments, a T cell is a Treg cell (e.g., Foxp+, Tr1, Th3, CD4+, CD8+CD8+CD28−, or Qa-1 restricted), and is edited using the CISC components as provided herein. In some embodiments, a cell as provided herein is an engineered cell. In some embodiments, an engineered cell is a cell in which one or more genes/loci are manipulated or edited (e.g., to stabilize expression of one or more genes). In some embodiments, an engineered cell comprises an edited Foxp3 gene/locus, e.g., obtained by inserting a promoter (in some embodiments, downstream of (e.g., 10 to 10,000 bp downstream from) one or more regulatory elements like the TSDR, and/or upstream from the first coding exon or codon).

### Methods of Editing TRAC Locus in a Cell's Genome

[0387] Provided herein are different methods of editing the TRAC locus in a cell. In some embodiments, the TRAC locus is edited to introduce a nucleic acid encoding an antigen-specific receptor, such as an exogenous TCR or CAR, and a nucleic acid encoding a first or second CISC component as described herein. In some embodiments, a promoter capture method is used in which a native/naturally-occurring/endogenous promoter is relied upon for control of inserted TCR-encoding nucleic acid, which may be followed by nucleic acid encoding one or more CISC components as described herein (see e.g., FIGS. 54, 68, and 70). In some embodiments such an endogenous promoter capture method comprises in-frame knock-in to TRAC exon 1 to drive expression of a TCR relying on endogenous TRAC promoter. In some embodiments, a TCR knock-in strategy is employed and comprises knock-in of a promoter and TCR-encoding nucleic acid, which may be followed by nucleic acid encoding one or more CISC components as described herein (see e.g., FIG. 67). It should be understood that any embodiments of a method comprising insertion of a TCR or nucleic acid encoding a TCR can be modified to insert a CAR or a nucleic acid encoding a CAR. In some embodiments, the native/naturally-occurring/endogenous TCR gene or fragments thereof are hijacked by insertion of a promoter upstream from the native/naturally-occurring/endogenous and optionally upstream from nucleic acid encoding one or more CISC components as described herein (see e.g., FIG. 164).

### Promoter Capture Methods

[0388] In some embodiments, a TRAC locus in a cell is edited by promoter capture (e.g., the method depicted in FIGS. 54, 68, and 70). In some embodiments of the methods provided herein, a cell is edited by inserting a nucleic acid molecule comprising a nucleic acid encoding an exogenous TCR or CAR into the TRAC locus, wherein the nucleic acid encoding the TCR or CAR is inserted downstream of (e.g., 10 to 10,000 bp downstream from) the endogenous TRAC promoter and in-frame with the TRAC coding sequence, such that the endogenous TRAC promoter becomes operably linked to the inserted nucleic acid and drives expression of the exogenous TCR or CAR. Thus, in some embodiments, the exogenous TCR or CAR is expressed at a similar level to expression of the endogenous TCR before the genetic modification. In some embodiments, the nucleic acid molecule comprising a nucleic acid encoding the exogenous TCR or CAR further comprises a nucleic acid encoding a first or second CISC component as described herein. In some embodiments, the nucleic acid molecule comprising a nucleic acid encoding the exogenous TCR or CAR further comprises a nucleic acid encoding a third CISC component as described herein.

### TCR/CAR Knock-In Methods

[0389] In some embodiments, a TRAC locus in a cell is edited by knocking in a full TCR (e.g., an islet TCR) or CAR with a promoter (e.g., MND promoter) operably linked to the polynucleotide/nucleic acid encoding the TCR or CAR and terminating in a stop codon and polyadenylation signal for expression independent of the endogenous TRAC regulatory elements. See FIG. 67 as an example of such a method. In some embodiments, a cell is edited by inserting a nucleic acid molecule comprising a heterologous promoter operably linked to a polynucleotide/nucleic acid encoding a TCR or CAR into the TRAC locus, such that the heterologous promoter drives expression of the inserted TCR or CAR while simultaneously disrupting the endogenous TRAC gene. In some embodiments, the nucleic acid molecule comprising a polynucleotide/nucleic acid encoding the exogenous TCR or CAR further comprises a polynucleotide/nucleic acid encoding a first or second CISC component as described herein. In some embodiments, the polynucleotide molecule comprising a nucleic acid encoding the exogenous TCR or CAR further comprises a nucleic acid encoding a third CISC component as described herein.

### Hijacking the TRAC Gene with a Promoter

[0390] In some embodiments, a TRAC locus in a cell is edited by hijacking the TRAC gene with a promoter (e.g., MND promoter) as shown in FIG. 164. In some embodiments, a cell is edited by inserting a polynucleotide molecule comprising a promoter operably linked to (a) a nucleic acid encoding a full-length TCRβ protein, and to a nucleic acid encoding TCRα variable (TRAV) and TCR joining (TRAJ) regions, where the coding sequences of the TRAV and TRAJ regions are inserted in-frame with the coding sequences encoding the TCRα constant regions, such that the inserted heterologous promoter controls transcription of a heterologous TCRβ protein and transcription of a TCRα protein comprising heterologous TRAV/TRAJ amino acid sequences and an endogenous TCRα constant region amino acid sequence. This embodiment utilizes the endogenous 3′ regulatory region from the endogenous TRAC gene. In some embodiments, the polynucleotide molecule comprising a nucleic acid encoding the exogenous TCR or CAR further comprises a nucleic acid encoding a first or second CISC component as described herein. In some embodiments, the polypeptide molecule comprising a nucleic acid encoding the exogenous TCR or CAR further comprises a nucleic acid encoding a third CISC component as described herein.

[0391] Provided herein are airT cells, e.g., cells that are edited in one, two, or more than two loci by the insertion of nucleic acids encoding at least two CISC components (e.g., at least a first and a second CISC component) and optionally a third CISC component.

[0392] Some embodiments include use of such systems to edit a FOXP3 locus gene and TRAC locus in a Treg cell. More embodiments relate to use of gene-edited Treg cells to suppress activation and/or proliferation of certain populations of cells. Such suppression can be performed either in vitro, ex vivo, or in vivo (e.g., but administering the cells to a subject with or without a ligand (such as rapamycin) to activate or maintain activation of the cells' suppressive phenotype).

[0393] Some embodiments of the methods and compositions provided herein relate to artificial antigen-specific immunoregulatory T (airT) cells. AirT cells may also be referred to as “edTreg” or “Edited Treg” cells or “EngTreg” or “Engineered Treg” cells. An AirT cell can also be a Tr1 cell, e.g., a cell that expresses IL-10. Some embodiments include an artificially engineered T cell (e.g., a T lymphocyte). Some embodiments include a CD4+CD25+ T cell having an artificial modification of a forkhead box protein 3/winged helix transcription factor (FOXP3) gene, and that constitutively expresses a FOXP3 gene product at a FOXP3 expression level that is equal to or greater than the FOXP3 expression level of a naturally occurring regulatory T (Treg) cell; and at least one transduced polynucleotide encoding an antigen-specific T cell receptor (TCR) polypeptide.

[0394] Some embodiments provided herein relate to efficient editing of more than one genetic locus in a cell using a chemical-inducible signaling complex (CISC) system in which components of the CISC system are provided with increased levels of expression compared to a CISC system with an alternative orientation and/or inclusion of elements. In some embodiments, a gene-editing system, as described herein, comprising one or more (e.g., two) constructs, each construct comprising a promoter and one or more elements (e.g., a polynucleotide/nucleic acid encoding a first CISC component, and a polynucleotide/nucleic acid encoding a TCR) that are configured to provide optimal expression of all CISC components. This is based, at least in part, on the finding that orientation of the split CISC (comprising first and second CISC components on different cassettes, each cassette targeting a different gene locus) is critical to their function. It was unexpectedly found that split CISC function is dependent upon expression of the different components of the CISC system and/or location of these elements within a construct/cassette (e.g., an HDR cassette). Accordingly, in some embodiments, one or more constructs for a gene-editing system as described herein comprises a promoter (e.g., an MND promoter) that results in a high expression of CISC component compared to promoters (e.g., EF1-alpha) that results in a lower expression of CISC components. In some embodiments, each of the constructs targets a different gene locus.

### Methods of Suppressing Proliferation of Teff Cells Using Genetically Modified/Engineered airT Cells; and Bystander Effect

[0395] Some embodiments provided herein relate to methods of suppressing proliferation of Teff cells using genetically modified/engineered Treg cells. Some such embodiments can include a bystander effect in which the Treg cell comprises a TCR specific for a first epitope of an antigen, and the Teff cells comprise a TCR specific for a second epitope of the antigen.

[0396] Certain features useful in certain embodiments provided herein are disclosed in Int. App. No. PCT/US2020/039445 filed Jun. 24, 2020 entitled “ARTIFICIAL ANTIGEN-SPECIFIC IMMUNOREGULATORY T (AIRT) CELLS”; U.S. Prov. App. No. 62/987,810 filed Mar. 10, 2020 entitled “ARTIFICIAL ANTIGEN-SPECIFIC IMMUNOREGULATORY T (AIRT) CELLS”; and U.S. Prov. App. No. 62/867,670 filed Jun. 27, 2019 entitled “ANTIGEN-SPECIFIC TREG THERAPY FOR AUTOIMMUNE DISEASE” which are each expressly incorporated by reference in its entirety. Certain other features useful in certain embodiments provided herein are disclosed in Int. App. No. PCT/US2017/065746 filed Dec. 12, 2017 entitled “METHODS OF EXOGENOUS DRUG ACTIVATION OF CHEMICAL-INDUCED SIGNALING COMPLEXES EXPRESSED IN ENGINEERED CELLS IN VITRO AND IN VIVO”; and Int. App. No. PCT/US2019/029118 filed Apr. 25, 2019 entitled “RAPAMYCIN RESISTANT CELLS” which are each expressly incorporated by reference in their entirety.

[0397] In some embodiments, the airT cells are capable of mediating antigen-specific immunosuppression when induced by a specific antigen that is recognized by a TCR, such as an autoantigen, an allergen, or another antigen associated with the pathogenesis of an inflammatory condition characterized by an excessive immune response. Significantly, production of the present airT cells does not require the time, costs, and inefficiencies associated with isolation of relatively rare (14% of human PBMC) natural Treg cells as a starting material for gene editing, thus affording certain advantages for the generation of therapeutically effective amounts of desired cells for adoptive immunotherapy. The airT cells of the present application can be formed from use of cells that are not T cells, e.g., a stem cell. In some embodiments, an airT cell is produced by gene editing of an induced pluripotent stem cell (iPSC). In some embodiments, an airT cell is produced by gene editing of a CD34+ hematopoietic stem cell (HSC). In some embodiments, a stem cell is first differentiated into a T cell and then that T cell is transformed into an airT cell.

[0398] In some embodiments, the airT cell expresses a functional TCR that specifically recognizes an antigen associated with pathogenesis of an autoimmune condition, an allergic condition, an inflammatory condition, or solid organ transplant or graft-versus-host disease, such as a TCR comprising any of the TCR polypeptide sequences disclosed herein or any of the TCR polypeptides encoded by the TCR-encoding nucleic acid sequences disclosed herein, including those set forth in the Drawings.

[0399] In some embodiments, the airT cell expresses a functional TCR that specifically recognizes an antigen associated with pathogenesis of an autoimmune condition, an allergic condition, or an inflammatory condition, such as any of the polypeptide autoantigens, allergens, and/or inflammation-associated antigens comprising the polypeptide antigen amino acid sequences disclosed herein, or any polypeptide antigens that are immunologically cross-reactive with the polypeptide autoantigens, allergens, and/or inflammation-associated antigens comprising the polypeptide antigen amino acid sequences disclosed herein, including those set forth in the Drawings.

[0400] Certain of the herein disclosed embodiments relate to gene editing strategies for the generation of the airT cells that include surprisingly advantageous functional linkage of (i) stable FoxP3 expression that results from targeted FoxP3 gene editing, including the introduction of a promoter, such as a constitutive promoter, to drive FoxP3 expression in cells that did not previously express FoxP3, wherein the FoxP3 expression is at a level equal to or greater than the FoxP3 expression level of a naturally occurring regulatory T (Treg) cell, to maintain a stable FoxP3-controlled immunoregulatory (immunosuppressive) program of the airT cell, and (ii) stable expression of an exogenously sourced TCR in the same cells by gene editing to introduce into the airT cell the particular presently disclosed nucleotide sequences encoding TCR that recognize antigens associated with pathogenesis of an autoimmune condition, an allergic condition, or an inflammatory condition, to permit selection and expansion of engineered T cells characterized by stable immunosuppressive potential that co-segregates with desired TCR expression. Without wishing to be bound by theory, it is believed that by artificially engineered stable FoxP3 expression, some embodiments of the presently described airT cells include safe and effective adoptive transfer immunotherapy cells for indications where antigen-specific immunosuppression is desirable, such as autoimmune, allergic, graft vs host disease (GVHD), or other inflammatory conditions, without the risks associated with natural Treg plasticity (e.g., reversion to T effector behavior).

[0401] Production of the presently disclosed airT cell advantageously and in some embodiments does not include first isolating natural Treg cells, which as noted above, are naturally present in peripheral blood at a low frequency, representing only about 14% of human peripheral blood mononuclear cells. Instead, as described herein, generation of airT cells can be achieved by isolating T cells, such as CD4+ T cells or CD8+ T cells, which although heterogeneous with respect to other cell surface markers may comprise approximately 25-60% of human PBMC and thus represent a relatively abundant starting material for gene editing according to the various strategies provided herein.

[0402] The present antigen-specific immunoregulatory T (airT) cell compositions and methods will, in certain embodiments, find uses in the treatment and/or amelioration of certain autoimmune conditions, allergic conditions, and/or inflammatory conditions, including in adoptively transferable immunotherapy, where stable airT cell viability and maintenance of antigen-specific immunoregulatory function provide unprecedented benefits.

[0403] In certain embodiments the airT cell described herein is unexpectedly capable of inducing an antigen-specific immunosuppressive response when stimulated by an antigen associated with pathogenesis of an autoimmune condition, an allergic condition, or an inflammatory condition such as one of the antigens disclosed herein. Such antigen-specifically induced immunosuppression may comprise one or more of: (i) inhibition of either or both of activation and proliferation of effector T cells that recognize the antigen that is specifically recognized by the airT TCR comprising the TCR polypeptide that is encoded by the at least one transduced polynucleotide/nucleic acid, (ii) inhibition of expression of inflammatory cytokines or inflammatory mediators by effector T cells that recognize the antigen that is specifically recognized by the airT TCR comprising the TCR polypeptide that is encoded by the at least one transduced polynucleotide/nucleic acid (iii) elaboration of one or more immunosuppressive cytokines or anti-inflammatory products, for example, elaboration of one or more inhibitory mechanisms including release of immunosuppressive cytokines or perforin/granzyme, induction of indoleamine 2,3-dioxygenase (IDO), competition for IL2 or adenosine, catabolism of tryptophan, and expression of inhibitory receptors by the airT cell, by the airT cell, (iv) inhibition of either of or both activation and proliferation of effector T cells that do not recognize the antigen that is specifically recognized by the airT TCR comprising the TCR polypeptide that is encoded by the at least one transduced polynucleotide/nucleic acid, and (v) inhibition of expression of inflammatory cytokines or inflammatory mediators by effector T cells that do not recognize the antigen that is specifically recognized by the airT TCR comprising the TCR polypeptide that is encoded by the at least one transduced polynucleotide/nucleic acid, or (vi). In some embodiments such antigenic stimulation of the airT cell is HLA-restricted.

[0404] In some embodiments, the generation of the present airT cells, which stably express FoxP3 as described herein, overcomes certain disadvantages associated with prior methodologies in which FOXP3 transgene expression was achieved by retroviral or lentiviral gene transfer. The resulting virally FoxP3-transduced cell populations were genetically heterogeneous by virtue of having randomly integrated FOXP3 transgenes of varying stability and varying expression levels at various genomic sites. Despite at least transiently exhibiting Treg characteristics such as phenotypic markers and cytokine expression profile, such transduced populations were also potentially compromised by carrying a concomitant risk of genotoxicity, as well as vulnerability to silencing by local regulatory elements at sites of viral integration.

[0405] To avoid these risks, some embodiments provided herein include the use of specifically targeted gene editing for artificial modification of the FOXP3 gene instead of relying on viral FOXP3 gene transfer and, optionally specifically targeted TCR gene editing. Certain embodiments described herein utilize lentiviral gene delivery to introduce candidate autoimmune-related TCRs (or CARs) into T cells, such as CD4 T cells or CD8 T cells, followed by FOXP3 gene editing of the cells to force stable FoxP3 expression. In some related embodiments, this approach is combined with any one of the TRAC locus editing methods disclosed herein, e.g., gene editing methods to simultaneously delete the endogenous TCR gene (e.g., via inactivation, also referred to herein as “knockout”).

[0406] As an alternative strategy distinct from lentiviral TCR delivery, some embodiments described herein relate to simultaneous gene editing at different alleles of the same gene locus e.g., single-locus bi-allelic dual editing in which dual-editing is achieved at a single locus (e.g., with a single guide RNA and AAV donor homology constructs). In some embodiments, methods of gene editing at two alleles of the same locus comprise i) inserting a first donor template into a first allele of a locus; and ii) inserting a second donor template into a second allele of the same locus. Each donor template may be inserted into an allele of the locus by any of the gene editing methods provided herein. In some embodiments, the method comprises providing an RNA-guided nuclease or a nucleic acid encoding the RNA-guided endonuclease, and a guide RNA that directs the RNA-guided nuclease to cleave a nucleotide sequence within the locus. Thus, an RNA-guided nuclease cleaves nucleotide sequences within both alleles of the locus and each donor template is inserted into a separate allele of the locus by homology-directed repair. Competition for the single double-strand break by both donor templates results in a predicable subpopulation of bi-allelic edited cells that have incorporated one copy of each donor template. In some embodiments, methods of gene editing at two alleles of the same locus comprise providing to the cell a nuclease (e.g., meganuclease, TALEN, or ZFN) that cleaves a nucleotide sequence within both alleles of the locus. Mono-allelic vs bi-allelic modification may comprise using a locus and HDR templates that have a very high HDR rate (such as the TRAC locus in primary T-Cells), and choosing an endonuclease with a lower or higher efficiency. Alternatively gRNAs are selected so that it is more efficient on one allele. Any method of assessing single or bi-allelic modifications can be used, e.g., sequencing analysis.

[0407] As another alternative, some embodiments described herein relate to simultaneous gene editing at two different gene loci, e.g., two-loci dual editing in which a distinct gene editing event takes place at each of two loci (e.g., with two different guide RNAs and locus-specific AAV donor homology cassettes). In some embodiments, methods of gene editing at two distinct loci comprise i) inserting a first donor template into a first locus; and ii) inserting a second donor template into a second locus that is different from the first locus. Each donor template may be inserted into a respective locus by any of the gene editing methods provided herein. In some embodiments, the method comprises providing an RNA-guided nuclease or a nucleic acid encoding the RNA-guided endonuclease, a first guide RNA that directs the RNA-guided nuclease to cleave a nucleotide sequence within the first locus, and a second guide RNA that directs the RNA-guided nuclease to cleave a nucleotide sequence within the second locus. Thus, an RNA-guided nuclease cleaves both loci after being directed to each locus by respective guide RNAs, and each donor template is inserted by homology-directed repair. In some embodiments, methods of gene editing at two distinct loci comprise providing to the cell a first nuclease (e.g., meganuclease, TALEN, or ZFN) that cleaves a nucleotide sequence within a first locus; and a second nuclease (e.g., meganuclease, TALEN, or ZFN) that cleaves a nucleotide sequence within a second locus. Inserting a first donor template and second donor template into a first and second locus, respectively, can be done by contacting a cell with (i) a first polypeptide comprising a nucleic acid encoding a first CISC component comprising a first extracellular binding domain, first transmembrane domain, and first intracellular signaling domain (ii) a second polypeptide comprising a second nucleic acid encoding a second CISC component comprising a second extracellular binding domain, a transmembrane domain, and a second intracellular signaling domain, (iii) a first endonuclease, or nucleic acid encoding the first endonuclease, that can cleave a first nucleotide sequence within a first locus, (iv) a second endonuclease, or nucleic acid encoding the second endonuclease, that can cleave a second nucleotide sequence within a second locus, such that the first polynucleotide or fragment thereof is incorporated into the first locus, and the second polynucleotide or fragment there is inserted in the second locus; as described above.

[0408] By these approaches, engineered FOXP3 and TCR genes (or any other payload) may be delivered to a single specific gene locus or to two different specific loci. As also described herein, in some embodiments this strategy may further include incorporating split chemical-induced signaling complex (split CISC) components that permit selective expansion of only those T cells that express both the FOXP3 and the inserted TCR in the same cell, thereby enriching for airT cells. Provided herein is a method of selective expansion of cells, the method comprising (i) inserting into one or more cells in a population (a) a first polynucleotide molecule comprising a nucleic acid encoding a first CISC component; and (b) a second polynucleotide molecule comprising a nucleic acid encoding a second CISC component, wherein the first and second CISC components are capable of specifically binding to a CISC inducer molecule and dimerizing in the CISC inducer molecule, and (ii) contacting the cell with the CISC inducer molecule to promote proliferation and/or activation of cells expressing both the first and second CISC components. In some embodiments, the first or second polynucleotide molecule comprises a nucleic acid encoding a third CISC component that is soluble, cytosolic, and capable of specifically binding to the CISC inducer molecule, where expression of the third CISC component prevents or reduces an effect of the CISC inducer molecule on endogenous signaling pathways. Any transfection and genome modification methods may be used for inserting a first and second nucleic acid or nucleic acid molecule. In some embodiments, inserting a first donor template and second donor template into a first and second locus can be done by contacting a cell with (i) a first nucleic acid comprising a nucleic acid encoding a first CISC component comprising a first extracellular binding domain, first transmembrane domain, and first intracellular signaling domain (ii) a second nucleic acid comprising a second nucleic acid encoding a second CISC component comprising a second extracellular binding domain, a transmembrane domain, and a second intracellular signaling domain, (iii) a first endonuclease, or nucleic acid encoding the first endonuclease, that can cleave a first nucleotide sequence within a first locus, (iv) a second endonuclease, or nucleic acid encoding the second endonuclease, that can cleave a second nucleotide sequence within a second locus, such that the first polynucleotide or fragment thereof is incorporated into the first locus, and the second polynucleotide or fragment there is is inserted in the second locus; as described above.

### Chemical-Induced Signaling Complex (CISC)

[0409] As described herein, some embodiments exploit a split chemical-induced signaling complex (split CISC) strategy by which gene-edited airT cells may be generated and selectively expanded on the basis of successful expression in the same cells of both (i) a constitutively expressed FoxP3 gene-edited gene product, the expression of which is associated with cell surface expression of a first CISC component that specifically binds to a CISC inducer molecule, the first CISC component being present as a transmembrane fusion protein having a first extracellular CISC inducer molecule binding domain, a transmembrane domain, and a first intracellular activation signal transduction domain; and (ii) a transduced heterologous TCR gene-edited gene product, the expression of which is associated with cell surface expression of a second CISC component that is different than the first CISC component and specifically binds to the CISC inducer molecule, the second CISC component being present as a transmembrane fusion protein having a second extracellular CISC inducer molecule binding domain, a transmembrane domain, and a second intracellular activation signal transduction domain that is different than the first intracellular activation signal transduction domain. In some embodiments, a first CISC component comprises an FKBP extracellular domain and an IL2RB intracellular domain, and a second CISC component comprises an FRB extracellular domain and an IL2RG intracellular domain. In some embodiments, a first CISC component comprises an FKBP extracellular domain and an IL2RG intracellular domain, and a second CISC component comprises an FRB extracellular domain and an IL2RB intracellular domain. In some embodiments, one or both of the first and second CISC components comprises a hinge domain positioned between the extracellular domain and the transmembrane domain. In some embodiments, each of the first and second CISC components comprise a hinge domain positioned between the extracellular domain and the transmembrane domain.

[0410] In certain embodiments, CD3+ T cells, CD4+ T cells or CD8+ T cells are enriched from a biological sample such as peripheral blood mononuclear cells (PBMC) prior to gene editing (e.g., dual editing) as described herein. In certain embodiments enriched CD3+, CD4+ T cells, or CD8+ T cells are non-specifically activated (e.g., with solid-phase immobilized anti-CD3 and anti-CD28 antibodies) prior to gene editing (e.g., dual editing) as described herein.

[0411] In some embodiments, exposure of dual-edited T cells as described herein to the CISC inducer molecule results in binding of the inducer molecule to the extracellular domains of both the first and second CISC components and heterodimer formation by the first and second CISC components to activate a functional signal transduction complex that is formed by the first and second intracellular activation signal transduction domains. As a consequence, the population of airT cells in which are expressed both the first and second CISC components, and hence, payloads with the first and second CISC, e.g., both FoxP3 and the heterologous TCR, is selectively expanded in culture conditions where the CISC inducer molecule is supplied in replacement of the endogenous signal transducer.

[0412] In some embodiments, the two gene editing events that give rise to expression in the present airT cells, of the first CISC component concomitant with the FoxP3 gene product and of the second CISC component concomitant with the TCR gene product, may be designed to take place in different alleles of the same gene locus (e.g., bi-allelic dual editing), or at two different gene loci (e.g., two-loci dual editing). In some embodiments, methods of gene editing at two alleles of the same locus comprise i) inserting a first donor template into a first allele of a locus; and ii) inserting a second donor template into a second allele of the same locus. Each donor template may be inserted into an allele of the locus by any of the gene editing methods provided herein. In some embodiments, the method comprises providing an RNA-guided nuclease or a nucleic acid encoding the RNA-guided endonuclease, and a guide RNA that directs the RNA-guided nuclease to cleave a nucleotide sequence within the locus. Thus, an RNA-guided nuclease cleaves nucleotide sequences within both alleles of the locus and each donor template is inserted into a separate allele of the locus by homology-directed repair. In some embodiments, methods of gene editing at two alleles of the same locus comprise providing to the cell a nuclease (e.g., meganuclease, TALEN, or ZFN) that cleaves a nucleotide sequence within both alleles of the locus.

[0413] In some embodiments, methods of gene editing at two distinct loci comprise i) inserting a first donor template into a first locus; and ii) inserting a second donor template into a second locus that is different from the first locus. Each donor template may be inserted into a respective locus by any of the gene editing methods provided herein. In some embodiments, the method comprises providing an RNA-guided nuclease or a nucleic acid encoding the RNA-guided endonuclease, a first guide RNA that directs the RNA-guided nuclease to cleave a nucleotide sequence within the first locus, and a second guide RNA that directs the RNA-guided nuclease to cleave a nucleotide sequence within the second locus. Thus, an RNA-guided nuclease cleaves both loci after being directed to each locus by respective guide RNAs, and each donor template is inserted by homology-directed repair. In some embodiments, methods of gene editing at two distinct loci comprise providing to the cell a first nuclease (e.g., meganuclease, TALEN, or ZFN) that cleaves a nucleotide sequence within a first locus; and a second nuclease (e.g., meganuclease, TALEN, or ZFN) that cleaves a nucleotide sequence within a second locus.

[0414] In some embodiments, a locus comprises a nucleic acid sequence encoding a gene. In some embodiments, a locus comprises a nucleic acid comprising one or more exons encoding a gene, and one or more nucleotides between the one or more exons. In some embodiments, a locus comprises a nucleic acid comprising a one or more regulatory elements and a nucleic acid sequence encoding a gene. In some embodiments, a single gene in a genome comprises multiple loci. In some embodiments, multiple loci comprise multiple nucleic acid sequences that do not share common nucleotides. In some embodiments, multiple loci comprise multiple nucleic acid sequences, and no nucleotide belongs to more than one locus. In some embodiments, a third CISC component that specifically binds to the CISC inducer molecule may also be co-expressed with either the FoxP3 gene product or the TCR gene product. The third CISC component remains at an intracellular locale when expressed and acts as a decoy to bind and thereby avoid toxicities associated with certain CISC inducer molecules that may reach the cell interior.

[0415] Details of CISC systems, including structures of first, second and third CISC components and of CISC inducer molecules are described elsewhere herein and in WO/2018/111834 and WO/2019/210078, which are both expressly incorporated by reference in their entireties. Briefly, WO/2018/111834 describes compositions and methods for genetically editing host cells by knock-in (insertion) of genetic constructs encoding a ligand-dimerizable fusion protein chemical-induced signaling complex (CISC). Cellular expression of both fusion protein subunits followed by exposure of the host cells to the chemical ligand permits ligand-induced dimerization of the CISC to transduce a cellular activation signal. The CISC system thus provides selection and expansion (e.g., activation-induced proliferation) of cells that have undergone gene modification to incorporate both of the CISC components, to select cells in which gene editing has occurred. WO/2019/210078 describes gene editing compositions and methods in which nucleic acid sequences encoding first and second CISC subunit components are introduced to host cells as part of gene editing at a single targeted FOXP3, TRAC, or AAVS1 gene locus. Chemical ligand-induced dimerization of the CISC can induce a biological signal transduction event for selection and expansion of edited cells. Optionally and in some related embodiments a nucleic acid encoding a third CISC subunit component is also expressed in the host cells; the third CISC component remains intracellularly expressed as a decoy to decrease potential harmful effects on the cell of internalized CISC ligand.

[0416] Exemplary first and second CISC subunit components may comprise functional intracellular signal transduction domains of IL2-receptor beta and gamma subunits (IL2RB, IL2RG). An exemplary third CISC component may comprise a functional rapamycin-binding domain of FK506-binding protein (FKBP). An exemplary third CISC component may comprise an FKBP-rapamycin-binding protein (FRB), which binds the complex of FKBP-bound rapamycin.

### Polynucleotides Comprising Nucleic Acids Encoding CISC Components

[0417] Some embodiments of the methods provided herein include inserting into the genome of a cell (i) a first polynucleotide molecule comprising a first nucleic acid encoding a first CISC component, and (ii) a second polynucleotide molecule comprising a second nucleic acid encoding a second CISC component encoding a second CISC component. In some embodiments, the first polynucleotide molecule comprises a nucleic acid encoding a first CISC component comprising an FKBP extracellular domain, a transmembrane domain, and an IL2RB intracellular signaling domain, and the second polynucleotide molecule comprises a second nucleic acid encoding a second CISC component comprising an FRB extracellular domain, a transmembrane domain, and an IL2RG intracellular signaling domain. In some embodiments, the first polynucleotide molecule comprises a nucleic acid encoding a first CISC component comprising an FKBP extracellular domain, a transmembrane domain, and an IL2RG intracellular signaling domain, and the second polynucleotide molecule comprises a second nucleic acid encoding a second CISC component comprising an FRB extracellular domain, a transmembrane domain, and an IL2RB intracellular signaling domain. In some embodiments, the nucleic acids encoding the first or second CISC component further comprises a nucleic acid encoding a third CISC component comprising a soluble FRB domain, and the third CISC component does not comprise a transmembrane or extracellular domain, such that the third CISC component is localized to the cytoplasm of the cell when expressed. In some embodiments, the first polynucleotide molecule encodes the first CISC component and the third CISC component in one open reading frame, where the nucleotide sequences encoding the first and third CISC components are separated by a nucleotide sequence encoding a self-cleaving peptide. In other embodiments, the second polynucleotide molecule encodes the second CISC component and the third CISC component in one open reading frame, where the nucleic acids encoding the second and third CISC components are separated by a nucleotide sequence encoding a self-cleaving peptide. In some embodiments, the self-cleaving peptide is selected from F2A, P2A, T2A, E2A, and combinations thereof (see, e.g., WO 2017/127750). This family of self-cleaving peptides, referred to as 2A peptides, has been described in the art (see, e.g., Kim, J. H. et al. PLoS ONE 2011;6:e18556).

### FOXP3/airT Phenotypic Markers and Suppressor Function

[0418] FOXP3 gene editing may include artificial modification of a native FOXP3 gene locus and/or may also include artificial modification of a chromosomal site other than a native FOXP3 gene locus. For example, gene editing may include knock-in (e.g., insertion) of a nucleic acid molecule comprising an exogenous FOXP3-encoding nucleic acid operably linked to a constitutive promoter at a chromosomal site other than a native FOXP3 gene locus, such as a T cell receptor alpha chain (TRAC) gene locus, a T cell receptor beta chain (TCRB) locus or an adeno-associated virus integration site 1 (AAVS1) or another gene locus. Certain embodiments thus surprisingly provide the herein described airT cells, which are capable of mediating antigen-specific immunosuppression, when artificial FoxP3 gene sequences are introduced to a genomic site other than the native FOXP3 gene locus (e.g., in the TRAC locus) and are able constitutively to express a FOXP3 gene product at a level that is equal to or greater than the FOXP3 expression level of a naturally occurring Treg cell. In some embodiments of the methods provided herein, a heterologous promoter (e.g., an MND promoter) is inserted upstream of the first coding exon of FOXP3, and downstream of (e.g., 10 to 10,000 bp downstream from) one or more regulatory elements (e.g., a TSDR) of the endogenous FOXP3 coding sequence, such that the inserted promoter drives transcription of the endogenous FOXP3 gene independently of the upstream regulatory elements. In some embodiments, the method comprises inserting an MND promoter downstream of (e.g., 10 to 10,000 bp downstream from) a TSDR of the FOXP3 gene and upstream of the first coding exon of the FOXP3 gene.

[0419] The two (or more) gene editing events that give rise in certain embodiments to expression in the present airT cells, of the FoxP3 gene product (or another gene that regulates suppressive function of the cell) concomitant with the first CISC component and of the TCR gene product concomitant with the second CISC component concomitant, may be designed to take place in different alleles of the same gene locus (e.g., bi-allelic dual editing), or at two different gene loci (e.g., two-loci dual editing). In some embodiments, a locus comprises a nucleic acid sequence encoding a gene. In some embodiments, a locus comprises a nucleic acid comprising one or more exons encoding a gene, and one or more nucleotides between the one or more exons. In some embodiments, a locus comprises a nucleic acid comprising a one or more regulatory elements and a nucleic acid sequence encoding a gene. In some embodiments, a single gene in a genome comprises multiple loci. In some embodiments, multiple loci comprise multiple nucleic acid sequences that do not share common nucleotides. In some embodiments, multiple loci comprise multiple nucleic acid sequences, and no nucleotide belongs to more than one locus. In some embodiments the presently disclosed airT cell is surprisingly capable of expressing the FOXP3 gene product at an expression level sufficient for the airT cell to maintain a CD4+CD25+ phenotype for at least 21 days in vitro, or for at least 60 days in vivo following adoptive transfer to an immunocompatible mammalian host in need of antigen-specific immunosuppression, while functionally expressing a herein-disclosed TCR that specifically recognizes an antigen associated with pathogenesis of an autoimmune condition, an allergic condition, or an inflammatory condition, or a TCR that specifically recognizes a herein-disclosed antigen associated with pathogenesis of an autoimmune condition, an allergic condition, or an inflammatory condition.

[0420] The CD4+CD25+ or CD8+ airT cell disclosed herein thus in certain embodiments relates to a genetically engineered cell obtained by artificial modification of a FOXP3 gene in a CD4+CD25⁻ T cell. in some embodiments, the artificial modification causes the airT cell to constitutively express a FOXP3 gene product at a FOXP3 expression level that is equal to or greater than the FOXP3 expression level of a naturally occurring regulatory T (Treg) cell. In some embodiments of the methods provided herein, a heterologous promoter (e.g., an MND promoter) is inserted upstream of the first coding exon of FOXP3, and downstream of (e.g., 10 to 10,000 bp downstream from) one or more regulatory elements (e.g., a TSDR) of the endogenous FOXP3 coding sequence, such that the inserted promoter drives transcription of the endogenous FOXP3 gene independently of the upstream regulatory elements. In some embodiments, the method comprises inserting an MND promoter downstream of (e.g., 10 to 10,000 bp downstream from) a TSDR of the FOXP3 gene and upstream of the first coding exon of the FOXP3 gene. In some embodiments, the airT cell may also express the CD25, CD152, and/or ICOS cell surface markers at levels which are characteristic of immunoregulatory cells such as natural Treg. Unlike natural Treg, however, in some embodiments the present airT cells may exhibit a HeliosLo cell surface phenotype, e.g., an expression level of the Helios cell surface marker that is decreased, in a statistically significant manner, relative to the Helios expression level in naturally occurring Treg cells. It is to be understood that methods described herein that comprise manipulation of CD4+ cells or editing of the genome of CD4+ cells, can be applied to other types of cells (e.g., CD8+ cells).

[0421] Exemplary details of gene editing strategies to induce FoxP3 expression in T cells are described herein and in WO/2018/080541 and in WO/2019/210078, which are expressly incorporated by reference in their entireties. Exemplary details of forced FOXP3 expression by gene editing including knock-in (insertion) of a full length, codon-optimized FoxP3 cDNA into the FOXP3 or AAVS1 locus may be found in WO/2019/210042, which is expressly incorporated by reference in its entirety. In some embodiments, only a promoter (e.g., a constitutively active promoter) is inserted in the FOXP3 locus without inserting any polypeptide-encoding nucleic acid.

[0422] Briefly, WO/2018/080541 describes CD4+ T cells in which stable expression of endogenous FoxP3 is engineered by gene editing using Cas9, ZFN, or TALEN to knock-in (e.g., by insertion) a constitutive promoter that is an EF1a, PGK, or MND promoter.

[0423] Any method for gene editing (or genome editing) is contemplated herein, including, without limitation, viral and non-viral approaches that enable targeted gene-editing (e.g., Cas9, ZFN, TALEN). Accordingly, a method of gene editing as provided herein may make use of a nuclease to target a locus or a targeted locus on a nucleic acid sequence. In some embodiments, a nuclease is Cas9, a zinc-finger nuclease or TALEN. FoxP3 expression may be achieved by targeted knock-in (insertion), at the FOXP3 gene locus, of a polynucleotide comprising a regulatory sequence operably linked to a coding sequence for the first expressed FOXP3 exon. The regulatory sequence may comprise a promoter which in some embodiments may be the MND, PGK, or EF1a promoter, or another inducible, weak, or constitutive promoter. Exemplary edited FOXP3+ cells may comprise a fully methylated FOXP3 gene intronic regulatory T cell-specific demethylation region (TSDR) upstream of the knocked-in promoter integration site.

[0424] WO/2019/210078 describes forced expression of FoxP3 in CD4+ T cells to achieve cells having a Treg-like phenotype, methods of selecting for such cells to obtain a Treg-enriched preparation, and methods for expanding populations of such cells in vitro. WO/2019/210078 also describes compositions and methods for targeted gene editing at the FOXP3, AAVS1, and/or TCRalpha (TRAC) loci, including guide RNA (gRNA) sequences specific for each of these loci and donor templates for gene editing by HDR. WO/2019/210078 also describes a CISC system in which a chemical-ligand dimerization of first and second CISC components results in an activation signal that effects T cell proliferation and hence selective expansion of edited T cells. WO/2019/210078 describes first and second CISC components in which the CISC inducer molecule is rapamycin or any of a large number of disclosed rapamycin analogues, derivatives, and mimetics, and in which the activation signal transduction domains of the CISC components comprise functional portions of the cytoplasmic domains of the IL-2 receptor beta (IL2Rb, also referred to as IL2Rβ) and IL-2 receptor gamma (IL2Rg, also referred to as IL2Ry) subunits of the IL-2 receptor (IL2R).

[0425] Certain methods for phenotypic and functional characterization of Treg cells including cells in which FoxP3 overexpression has been induced are known in the art (e.g., WO/2018/080541, WO/2019/210078, McMurchy et al., 2013 Meths. Mol. Biol. 946: 115-132; Thornton et al., 2019 Eur. J. Immunol. 49:398-412; Aarts-Riemens et al., 2008 Eur. J. Immunol. 38: 1381-1390; McGovern et al., 2017 Front. Immunol. 8: Art. 1517; which are each expressly incorporated by reference in its entirety) and are described herein. These and related methodologies are applicable to characterization of the present airT cells as described herein.

[0426] Unlike natural Treg cells, in the presently disclosed airT cells the intronic Treg-specific demethylated region (TSDR) in the FoxP3 gene locus comprises cytosine-guanine (CG) dinucleotides having cytosine (C) nucleotides at certain positions that are predominantly methylated. For example, in the present airT cells at least 80%, 85%, 90%, 95%, 96%, 97%, 98%, or 99% of the TSDR C nucleotides at nucleotide positions that comprise a demethylated C nucleotide in a naturally occurring Treg cell are methylated. Methylation analysis of the FoxP3 TSDR is known to be routine in the art by any of several different methodologies (e.g., Salazar et al., 2017 Front. Immunol. 8:219; Ngalamika et al., 2014 Immunol. Invest. 44(2): 126-136 which is expressly incorporated by reference in its entirety).

[0427] Despite this difference in TSDR epigenetic modification between airT cells and natural Treg cells, the present airT cells are capable of mounting an immunosuppressive response to TCR stimulation by a specifically recognized antigen. The antigen-specific immunosuppressive properties of the presently disclosed airT cells were therefore unexpected in view of the report by Wright et al. (2009 Proc. Nat. Acad. Sci. USA 106: 19078) that co-transfection of CD4+ cells with FoxP3 and TCR constructs in viral vectors did not produce Treg-like cells that were functionally capable of exhibiting antigen-specific suppression. Without wishing to be bound by theory, it is believed that the presently disclosed airT cells thus provide unforeseen advantages that may derive at least in part from the manner in which they are prepared, including by artificial gene editing as described herein.

[0428] In certain embodiments the present airT cell may be gene edited so as to express a FoxP3 gene product that is encoded by a FoxP3-encoding nucleotide sequence that is operably linked to a constitutive promoter, wherein constitutive expression of the FoxP3 gene product refers to a FOXP3 expression level that is equal to or greater than the FOXP3 expression level of a naturally occurring regulatory T (Treg) cell. In some embodiments, only a regulatory element (e.g., a promoter) is inserted in the FOXP3 locus (e.g., a constitutive promoter downstream from one or more naturally-occurring regulator elements (e.g., CNS sequences) or the TSDR, without the insertion of a gene-encoding sequence/nucleic acid. In some embodiments, a promoter is inserted upstream from the first coding exon of FOXP3. In certain preferred embodiments the constitutive promoter is the MND promoter, and in certain preferred embodiments the MND promoter has been knocked-in to the native FOXP3 gene locus by HDR gene editing. In certain embodiments the constitutively active promoter is knocked-in downstream of (e.g., 10 to 10,000 bp downstream from) an intronic regulatory T cell (Treg)-specific demethylation region (TSDR) in the native FOXP3 gene locus. In certain embodiments, a nucleic acid molecule comprising an exogenous FOXP3-encoding nucleic acid operably linked to the constitutive promoter is knocked-in by HDR gene editing to the native FOXP3 gene locus. In certain embodiments, a nucleic acid molecule comprising an exogenous FOXP3-encoding nucleic acid operably linked to the constitutive promoter is knocked-in by HDR gene editing at a chromosomal site other than the native FOXP3 gene locus, such as a TRAC gene locus or an AAVS1 locus or another gene locus. Accordingly, in these and related embodiments, the present disclosure for the first time teaches certain unexpected advantages that are associated with artificial gene editing by which FOXP3 gene expression is regulated by the constitutively active promoter, and in particularly preferred embodiment by the constitutively active MND promoter, for the production of the presently described engineered artificial immunoregulatory T (airT) cells.

### Gene Editing Methods

[0429] Any one of a number of gene- or genome- editing methods can used to accomplish editing of a first or second locus (or additional loci), e.g., the TRAC locus and/or a Foxp3 locus. Non-limiting gene editing methods include RNA-guided nuclease (RGN)-mediated gene editing, zinc finger nuclease (ZFN)-mediated gene editing, transcription activator-like effector nuclease (TALEN)-mediated gene editing, transposon-mediated gene editing, serine integrase-mediated gene editing, lentivirus-mediated gene editing, CRISPR/Cas-mediated gene editing, and homologous recombination-mediated gene editing. As used herein, the term “chromosomal gene knockout” refers to a genetic alteration, inactivation, or introduced inhibitory agent in a host cell that prevents (e.g., reduces, delays, suppresses, or abrogates) production, by the host cell, of a functionally active endogenous polypeptide product. Alterations resulting in a chromosomal gene knockout or inactivation can include, for example, introduced nonsense mutations (including the formation of premature stop codons), missense mutations, gene deletion, or strand breaks, as well as the heterologous expression of inhibitory nucleic acid molecules that inhibit endogenous gene expression in the host cell.

[0430] In certain embodiments, a chromosomal gene knock-out or gene knock-in (e.g., insertion) is made by chromosomal editing of a host cell. Chromosomal editing can be performed using, for example, endonucleases. As used herein “endonuclease” refers to an enzyme capable of catalyzing cleavage of a phosphodiester bond within a polynucleotide chain. In certain embodiments, an endonuclease is capable of cleaving a targeted gene thereby inactivating or “knocking out” the targeted gene. An endonuclease may be a naturally occurring, recombinant, genetically modified, or fusion endonuclease. Examples of endonucleases for use in gene editing include zinc finger nucleases (ZFN), TALE-nucleases (TALEN), CRISPR-Cas nucleases, meganucleases, or megaTALs.

[0431] The nucleic acid strand breaks caused by the endonuclease are typically double-strand breaks (DSB) that may be commonly repaired through the distinct mechanisms of homology directed repair (HDR) by homologous recombination, or by non-homologous end joining (NHEJ). (NHEJ: Ghezraoui et al., 2014 Mol Cell 55(6):829-842; HDR: Jasin and Rothstein, 2013 Cold Spring Harb Perspect Biol 5(11):a012740, PMID 24097900) During HDR/homologous recombination, a donor nucleic acid molecule may be used for a donor gene “knock-in”, for target gene “knock-out”, and optionally to inactivate a target gene through a donor gene knock in or target gene knock out event. NHEJ is an error-prone repair process that often results in changes to the DNA sequence at the site of the cleavage, e.g., a substitution, deletion, or addition of at least one nucleotide. NHEJ may be used to “knock-out” a target gene. HDR is favored by the presence of a donor template at the time of DSB formation and is a preferred gene editing mechanism according to certain herein described embodiments.

[0432] As used herein, a “zinc finger nuclease” (ZFN) refers to a fusion protein comprising a zinc finger DNA-binding domain fused to a non-specific DNA cleavage domain, such as a Fok1 endonuclease. Each zinc finger motif of about 30 amino acids binds to about 3 base pairs of DNA, and amino acids at certain residues can be changed to alter triplet sequence specificity (see, e.g., Desjarlais et al., Proc. Natl. Acad. Sci. 90:2256-2260, 1993; Wolfe et al., J. Mol. Biol. 285:1917-1934, 1999). Multiple zinc finger motifs can be linked in tandem to create binding specificity to desired DNA sequences, such as regions having a length ranging from about 9 to about 18 base pairs. By way of background, ZFNs mediate genome editing by catalyzing the formation of a site-specific DNA double strand break (DSB) in the genome, and targeted integration of a transgene comprising flanking sequences homologous to the genome at the site of DSB is facilitated by homology directed repair (HDR). Alternatively, a DSB generated by a ZFN can result in knock out of target gene via repair by non-homologous end joining (NHEJ), which is an error-prone cellular repair pathway that results in the insertion or deletion of nucleotides at the cleavage site. In certain embodiments, a gene knockout or inactivation comprises an insertion, a deletion, a mutation or a combination thereof, made using a ZFN molecule.

[0433] As used herein, a “transcription activator-like effector nuclease” (TALEN) refers to a fusion protein comprising a TALE DNA-binding domain and a DNA cleavage domain, such as a FokI endonuclease. A “TALE DNA binding domain” or “TALE” is composed of one or more TALE repeat domains/units, each generally having a highly conserved 33-35 amino acid sequence with divergent 12th and 13th amino acids. The TALE repeat domains are involved in binding of the TALE to a target DNA sequence. The divergent amino acid residues, referred to as the Repeat Variable Diresidue (RVD), correlate with specific nucleotide recognition. The natural (canonical) code for DNA recognition of these TALEs has been determined such that an HD (histidine-aspartic acid) sequence at positions 12 and 13 of the TALE leads to the TALE binding to cytosine (C), NG (asparagine-glycine) binds to a T nucleotide, NI (asparagine-isoleucine) to A, NN (asparagine-asparagine) binds to a G or A nucleotide, and NG (asparagine-glycine) binds to a T nucleotide. Non-canonical (atypical) RVDs are also known (see, e.g., U.S. Patent Publication No. US 2011/0301073, which atypical RVDs are incorporated by reference herein in their entirety). TALENs can be used to direct site-specific double-strand breaks (DSB) in the genome of T cells. Non-homologous end joining (NHEJ) ligates DNA from both sides of a double-strand break in which there is little or no sequence overlap for annealing, thereby introducing errors that knock out gene expression. Alternatively, homology directed repair (HDR) can introduce a transgene at the site of DSB providing homologous flanking sequences are present in the donor template containing the transgene. In certain embodiments, a gene knockout comprises an insertion, a deletion, a mutation or a combination thereof, and made using a TALEN molecule.

[0434] As used herein, a “clustered regularly interspaced short palindromic repeats/Cas” (CRISPR/Cas) nuclease system refers to a system that employs a CRISPR RNA (crRNA)-guided Cas nuclease to recognize target sites within a genome (known as protospacers) via base-pairing complementarity and then to cleave the DNA if a short, conserved protospacer associated motif (PAM) immediately follows 3′ of the complementary target sequence. CRISPR/Cas systems are classified into types (e.g., type I, type II, type III, and type V) based on the sequence and structure of the Cas nucleases. The crRNA-guided surveillance complexes in types I and III need multiple Cas subunits. Type II system, the most studied, comprises at least three components: an RNA-guided Cas9 nuclease, a crRNA, and a trans-acting crRNA (tracrRNA). The tracrRNA comprises a duplex forming region. A crRNA and a tracrRNA form a duplex that is capable of interacting with a Cas9 nuclease and guiding the Cas9/crRNA:tracrRNA complex to a specific site on the target DNA via Watson-Crick base-pairing between the spacer on the crRNA and the protospacer on the target DNA upstream from a PAM. Cas9 nuclease cleaves a double-stranded break within a region defined by the crRNA spacer. Repair by NHEJ results in insertions and/or deletions which disrupt expression of the targeted locus. Alternatively, a donor template transgene with homologous flanking sequences can be introduced at the site of DSB via homology directed repair (HDR). The crRNA and tracrRNA can be engineered into a single guide RNA (sgRNA or gRNA) (see, e.g., Jinek et al., Science 337:816-21, 2012). Further, the region of the guide RNA complementary to the target site can be altered or programed to target a desired sequence (Xie et al., PLOS One 9:e100448, 2014; U.S. Pat. Appl. Pub. No. US 2014/0068797, U.S. Pat. Appl. Pub. No. US 2014/0186843; U.S. Pat. No. 8,697,359, and PCT Publication No. WO 2015/071474; each of which is incorporated by reference). Non-limiting examples of CRISPR/Cas nucleases include Cas9, SaCas9, CjCas9, xCas9, C2C1, Cas13a/C2c2, C2c3, Cas13b, Cpf1, and variants thereof.

[0435] In certain embodiments, a gene knockout or inactivation comprises an insertion, a deletion, a mutation or a combination thereof, and made using a CRISPR/Cas nuclease system. US/2016/033377 which is expressly incorporated by reference in its entirety, teaches methods for enhancing endonuclease-based gene editing, including AAV-expressed guide RNAs for use in CRISPR/Cas (e.g., Cas9) gene editing systems. Exemplary gRNA sequences and methods of using the same to knock out endogenous genes that encode immune cell proteins include those described in Ren et al., Clin. Cancer Res. 23(9):2255-2266 (2017), the gRNAs, CAS9 DNAs, vectors, and gene knockout techniques of which are hereby expressly incorporated by reference in their entirety.

[0436] As used herein, a “meganuclease,” also referred to as a “homing endonuclease,” refers to an endodeoxyribonuclease characterized by a large recognition site (double stranded DNA sequences of about 12 to about 40 base pairs). Meganucleases can be divided into five families based on sequence and structure motifs: LAGLIDADG, GIY-YIG, HNH, His-Cys box and PD-(D/E)XK. Exemplary meganucleases include I-SceI, I-CeuI, PI-PspI, PI-Sce, I-SceIV, I-CsmI, I-PanI, I-SceII, I-PpoI, I-SceIII, I-CreI, I-TevI, I-TevII and I-TevIII, whose recognition sequences are known (see, e.g., U.S. Pat. Nos. 5,420,032 and 6,833,252; Belfort et al., Nucleic Acids Res. 25:3379-3388, 1997; Dujon et al., Gene 82:115-118, 1989; Perler et al., Nucleic Acids Res. 22:1125-1127, 1994; Jasin, Trends Genet. 12:224-228, 1996; Gimble et al., J. Mol. Biol. 263:163-180, 1996; Argast et al., J. Mol. Biol. 280:345-353, 1998).

[0437] In certain embodiments, naturally occurring meganucleases may be used to promote site-specific genome modification of a target selected from PD-1, LAG3, TIM3, CTLA4, TIGIT, FasL, an HLA-encoding gene, or a TCR component-encoding gene. In other embodiments, an engineered meganuclease having a novel binding specificity for a target gene is used for site-specific genome modification (see, e.g., Porteus et al., Nat. Biotechnol. 23:967-73, 2005; Sussman et al., J. Mol. Biol. 342:31-41, 2004; Epinat et al., Nucleic Acids Res. 31:2952-62, 2003; Chevalier et al., Molec. Cell 10:895-905, 2002; Ashworth et al., Nature 441:656-659, 2006; Paques et al., Curr. Gene Ther. 7:49-66, 2007; U.S. Patent Publication Nos. US 2007/0117128; US 2006/0206949; US 2006/0153826; US 2006/0078552; and US 2004/0002092). In further embodiments, a chromosomal gene knockout is generated using a homing endonuclease that has been modified with modular DNA binding domains of TALENs to make a fusion protein known as a megaTAL. MegaTALs can be utilized to not only knock-out or inactivate one or more target genes, but to also introduce (knock in) heterologous or exogenous polynucleotides when used in combination with an exogenous donor template encoding a polypeptide of interest.

[0438] A chromosomal gene knockout can be confirmed directly by DNA sequencing of the host immune cell following use of the knockout procedure or agent. Chromosomal gene knockouts can also be inferred from the absence of gene expression (e.g., the absence of an mRNA or polypeptide product encoded by the gene) following the knockout.

[0439] In certain embodiments, a chromosomal gene knockout or inactivation comprises a knockout or inactivation of a TCR component gene selected from a TCR α variable region gene, a TCR β variable region gene, a TCR constant region gene, or a combination thereof.

### Cells in which the Genome is Edited

### T Cells and TCRs

[0440] Provided herein are airT cells comprising gene editing or modification in more than one locus of the genome, e.g., a first and second locus. The modification may be insertion of only a regulator element along with a CISC component, or insertion of one or more regulatory elements and one or more payloads, along with a CISC component. In some embodiments, a modification comprises insertion of more than one CISC component. In some embodiments, the present cell, such as a CD4+, CD4+CD25+, CD8+, CD8+CD25+, CD3+, or NK1.1+ airT cell comprises an artificial modification of a FOXP3 gene as described herein and further comprises at least one transduced polynucleotide/nucleic acid encoding an antigen-specific T cell receptor (TCR) polypeptide. Preferably and in certain embodiments, the native TCR gene has been knocked out, for example by a targeted gene editing knock out in the TCR alpha (TRAC) gene locus. As used herein “knocked out” can refer to the inactivation of a gene and/or the gene product, for example, such as by deletion of the gene or a portion of the gene, by insertion of nucleic acids into the gene to interrupt transcription and/or translation of the gene and/or its product. Also preferably and in certain embodiments, the transduced polynucleotide/nucleic acid encoding the TCR has been knocked in by gene editing to a specific gene locus, such as the TRAC gene locus or another targeted locus.

[0441] The present airT cells thus comprise artificial immunoregulatory T cells that in preferred embodiments are produced by selective editing of one or more specific gene loci in T lymphocytes as described herein. In some embodiments, an airT cell shows properties different from the cell that is engineered to produce it. For example, an airT cell may be produced from a stem cell. Preferred T cells are of mammalian origin, for example, T cells obtained from humans, non-human primates (e.g., chimpanzees, macaques, gorillas, etc.), rodents (e.g., mice, rats, etc.), lagomorphs (e.g., rabbits, hares, pikas, etc.), ungulates (e.g., cattle, horses, pigs, sheep, etc.), or other mammals. In certain preferred embodiments the T cells are human T cells. In some embodiments, a cell as provided herein is a human cell. In some embodiments, a cell is a lymphocyte (e.g., a NK1.1+, CD3+, CD4+, or CD8+ cell). In some embodiments, the cell is a T cell, a precursor T cell, or a hematopoietic stem cell. In some embodiments, the cell is a CD4+ T cell (e.g., a FOXP3−CD4+ T cell or a FOXP3+CD4+ T cell) or a CD8+ T cell (e.g., a FOXP3−CD8+ T cell or a FOXP3+ CD8+ T cell). In some embodiments, the cell is an NK-T cell (e.g., a FOXP3− NK-T cell or a FOXP3+ NK-T cell). In some embodiments, the cell is a regulatory B (Breg) cell (e.g., a FOXP3− B cell or a FOXP3+ B cell). In some embodiments, the cell is a CD25− T cell. In some embodiments, the cell is a regulatory T (Treg) cell. Non-limiting examples of Treg cells are Tr1, Th3, CD8+CD28−, and Qa-1 restricted T cells. In some embodiments, the Treg cell is a FOXP3+ Treg cell. In some embodiments, the Treg cell expresses CTLA-4, LAG-3, CD25, CD39, neuropilin-1, galectin-1, and/or IL-2Ra on its surface. In some embodiments, the cell is ex vivo. In some embodiments, a cell is in vivo. In some embodiments, a cell as provided herein is an engineered cell. In some embodiments, an engineered cell is a cell in which one or more genes/loci are manipulated or edited (e.g., to stabilize expression of one or more genes). In some embodiments, an engineered cell comprises editing of the Foxp3 gene/locus, e.g., by inserting a promoter (in some embodiments, downstream of (e.g., 10 to 10,000 bp downstream from) one or more regulatory elements like the TSDR, and/or upstream from the first coding exon). In some embodiments, the cell is a human cell. In some embodiments, a cell as described here in is isolated from a biological sample. A biological sample may be a sample from a subject (e.g., a human subject) or a composition produced in a lab (e.g., a culture of cells). A biological sample obtained from a subject make be a liquid sample (e.g., blood or a fraction thereof, a bronchial lavage, cerebrospinal fluid, or urine), or a solid sample (e.g., a piece of tissue) In some embodiments, the cell is obtained from peripheral blood. In some embodiments, the cell is obtained from umbilical cord blood.

[0442] A T cell or T lymphocyte is an immune system cell that matures in the thymus and produces a T cell receptor (TCR), e.g., an antigen-specific heterodimeric cell surface receptor typically comprised of an alpha-beta heterodimer or a gamma-delta heterodimer. T cells of a given clonality typically express only a single TCR clonotype that recognizes a specific antigenic epitope presented by a syngeneic antigen-presenting cell in the context of a major histocompatibility complex-encoded determinant. T cells can be naïve (“TN”; not exposed to antigen; increased expression of CD62L, CCR7, CD28, CD3, CD127, and CD45RA, and decreased or no expression of CD45RO as compared to TCM (described herein)), memory T cells (TM) (antigen experienced and long-lived), including stem cell memory T cells, and effector cells (antigen-experienced, cytotoxic). TM can be further divided into subsets of central memory T cells (TCM, expresses CD62L, CCR7, CD28, CD95, CD45RO, and CD127) and effector memory T cells (TEM, express CD45RO, decreased expression of CD62L, CCR7, CD28, and CD45RA). Effector T cells (TE) refers to antigen-experienced CD8+ cytotoxic T lymphocytes that express CD45RA, have decreased expression of CD62L, CCR7, and CD28 as compared to TCM, and are positive for granzyme and perforin. Helper T cells (TH) are CD4+ cells that influence the activity of other immune cells by releasing cytokines. CD4+ T cells can activate and suppress an adaptive immune response, and which of those two functions is induced will depend on the presence of other cells and signals. T cells can be collected using known techniques, and the various subpopulations or combinations thereof can be enriched or depleted by known techniques, for example, using antibodies that specifically recognize one or more T cell surface phenotypic markers, by affinity binding to antibodies, flow cytometry, fluorescence activated cell sorting (FACS), or immunomagnetic bead selection. Other exemplary T cells include regulatory T cells (Treg, also known as suppressor T cells), such as CD4+ CD25+(Foxp3+) regulatory T cells and Treg17 cells, as well as Tr1, Th3, CD8+CD28−, or Qa-1 restricted T cells.

### T Cell Receptors (TCRs) and Chimeric Antigen Receptors (CARs)

[0443] Some embodiments of the methods provided herein comprise inserting a nucleic acid molecule encoding an antigen-specific receptor into the genome of a cell. Expression of a heterologous antigen-specific receptor allows the genetically modified cell to be activated when the heterologous antigen-specific receptor binds to its cognate antigen, such as a peptide-MHC complex in the case of a heterologous T cell receptor (TCR), or non-MHC-associated antigen in the case of a chimeric antigen receptor (CAR). A transduced polynucleotide encoding an exogenously sourced TCR or CAR to be expressed in an airT cell may involve artificial modification of a native TCR gene locus (e.g., TRAC) and/or may also involve artificial modification of a chromosomal site other than a native TCR gene locus, for example, gene editing by knock-in (insertion) of a nucleic acid molecule comprising an exogenous TCR-encoding nucleic acid at a chromosomal site other than a native TCR gene locus, such as the FOXP3 gene locus, ROSA26 locus, or AAVS1 or another gene locus.

[0444] The two gene editing events that give rise in certain embodiments to expression in the present airT cells, of the TCR or CAR gene product concomitant with the first CISC component and of the FoxP3 gene product concomitant with the second CISC component concomitant, may be designed to take place in different alleles of the same gene locus (e.g., bi-allelic dual editing), or at two different gene loci (e.g., two-loci dual editing). Exemplary TCR amino acid and encoding nucleotide sequences are disclosed herein (e.g., FIG.s. 136-144) for TCR that specifically recognize antigens associated with the pathogenesis of autoimmune, allergic, and/or inflammatory conditions. In some embodiments, the TCR polypeptide binds to an antigen selected from the group consisting of vimentin, aggrecan, cartilage intermediate layer protein (CILP), preproinsulin, islet-specific glucose-6-phosphatase catalytic subunit-related protein (IGRP), and enolase. In some embodiments, the TCR polypeptide binds to an antigen present in or derived from a microorganism present in the gut. In some embodiments, the TCR polypeptide binds to an epitope of the bacterial protein OmpC. In some embodiments, the TCR polypeptide binds to an epitope of GAD65, PPI, or ZNT8. In some embodiments, the TCR polypeptide binds to an epitope of the E2 component of pyruvate dehydrogenase complex (PDC-E2). In some embodiments, the TCR polypeptide binds to a nuclear antigen. In some embodiments, the TCR polypeptide binds to a mitochondrial antigen. In some embodiments, the TCR polypeptide binds to an antigen comprising an epitope having the amino acid sequence of any one of SEQ ID NOs 1363-1376 and 1408-1415.

[0445] In some embodiments, the TCR polypeptide comprises: a CD3 alpha polypeptide having the amino acid sequence of any one of SEQ ID NOs 1377-1390; and/or a CD3 beta polypeptide having the amino acid sequence of any one of SEQ ID NOs 1377-1390.

[0446] In some embodiments, the TCR specifically binds an islet-specific peptide, such as peptide of GAD65 or IGRP. In some embodiments, the TCR specifically binds a peptide of GAD65. In some embodiments, the TCR specifically binds a peptide of IGRP. In some embodiments, the TCR specifically binds a GAD65 epitope selected from the group consisting of GAD65113-132, GAD265-284, GAD273-292, and GAD305-324. In some embodiments, the TCR specifically binds an IGRP epitope selected from IGRP17-36, IGRP241-260, and IGRP305-324. In some embodiments, the TCR specifically binds a peptide of PPI. In some embodiments the TCR specifically binds the epitope PPI76-90. In some embodiments, the TCR specifically binds a peptide of ZNT8. In some embodiments, the TCR specifically binds the epitope ZNT8266-285.

[0447] In some embodiments, an inserted polynucleotide encodes a CAR comprising an antigen-binding domain that specifically binds an antigen associated with an autoimmune, allergic, and/or inflammatory condition. A “chimeric antigen receptor” (CAR) refers to a fusion protein that is engineered to contain two or more naturally occurring amino acid sequences, domains, or motifs, linked together in a way that does not occur naturally or does not occur naturally in a host cell, which fusion protein can function as a receptor when present on a surface of a cell such as a T cell. CARs can include an extracellular portion comprising an antigen-binding domain (e.g., obtained or derived from an immunoglobulin or immunoglobulin-like molecule, such as a TCR antigen binding domain derived or obtained from a TCR specific for an autoantigen, an allergen, or an inflammatory disease-associated antigen, a scFv derived or obtained from an antibody, or an antigen-binding domain derived or obtained from a killer immunoreceptor from an NK cell) linked to a transmembrane domain and one or more intracellular signaling domains (optionally containing co-stimulatory domain(s)) (see, e.g., Sadelain et al., Cancer Discov., 3(4):388 (2013); see also Harris and Kranz, Trends Pharmacol. Sci., 37(3):220 (2016), Stone et al., Cancer Immunol. Immunother., 63(11):1163 (2014), and Walseng et al., Scientific Reports 7:10713 (2017), which CAR constructs and methods of making the same are incorporated by reference herein). Methods and compostions disclosed in the following publication can be useful with embodiments provided herein: U.S. patent Ser. No. 10/865,242 which is incorporated by reference in its entirety.

[0448] In some embodiments, the CAR binds to an antigen selected from the group consisting of vimentin, aggrecan, cartilage intermediate layer protein (CILP), preproinsulin, islet-specific glucose-6-phosphatase catalytic subunit-related protein (IGRP), and enolase. In some embodiments, the CAR binds to an antigen comprising an epitope having the amino acid sequence of any one of SEQ ID NOs 1363-1376 and 1408-1415. In some embodiments, the CAR specifically binds an islet-specific peptide, such as GAD65 or IGRP. In some embodiments, the CAR specifically binds GAD65. In some embodiments, the CAR specifically binds IGRP. In some embodiments, the CAR specifically binds a GAD65 epitope selected from the group consisting of GAD65113-132, GAD265-284, GAD273-292, and GAD305-324. In some embodiments, the CAR specifically binds an IGRP epitope selected from IGRP17-36, IGRP241-260, and IGRP305-324. In some embodiments, the CAR specifically binds PPI. In some embodiments the CAR specifically binds the epitope PPI76-90. In some embodiments, the CAR specifically binds ZNT8. In some embodiments, the CAR specifically binds the epitope ZNT8266-285.

### Target Specificity, TCRs, and CARs

[0449] As used herein, “T cell receptor” (TCR) refers to an immunoglobulin superfamily member having a variable binding domain, a constant domain, a transmembrane region, and a short cytoplasmic tail; see, e. g., Janeway et al., Immunobiology: The Immune System in Health and Disease, 3rd Ed., Current Biology Publications, p. 433, 1997. The TCR is capable of specifically binding to an antigen peptide bound to a major histocompatibility complex encoded (MHC) receptor. A TCR can be found on the surface of a T cell or may be released into the extracellular milieu in soluble form, and generally is comprised of a heterodimer having α and β chains (also known as TCR α and TCRβ, respectively), or 7 and 6 chains (also known as TCRγ and TCRδ, respectively), each having chain-characteristic constant (C) regions and highly polymorphic variable (V) regions in which reside complementarity determining regions (CDR) that are largely responsible for specific antigen recognition and binding by the TCR. In certain embodiments, a nucleic acid encoding a TCR can be codon optimized to enhance expression in a particular host cell, such as, for example, a cell of the immune system, a hematopoietic stem cell, a T cell, a primary T cell, a T cell line, a NK cell, or a natural killer T cell (Scholten et al., Clin. Immunol. 119:135, 2006).

[0450] Exemplary T cells that can express TCRs encoded by heterologous genetic material introduced in the cells according to certain embodiments of this disclosure include CD4+ T cells, CD8+ T cells, and related subpopulations thereof (e.g., naïve, central memory, stem cell memory, effector memory). In preferred embodiments the exemplary T cells are CD4+ T cells, the TCR-encoding genetic material is introduced by gene editing (e.g., homology directed repair following a specifically targeted double-strand break in genomic DNA), and the TCR specifically recognizes an antigen associated with pathogenesis of an autoimmune condition, an allergic condition, or an inflammatory condition, such as the specific TCRs that are structurally defined herein or TCRs that specifically recognize the particular autoantigen, allergen, or inflammatory disease antigen T cell epitopes that are disclosed herein.

[0451] Like other antigen-binding members of the immunoglobulin superfamily (e.g., the immunoglobulins, also referred to as antibodies), the extracellular portion of TCR chains (e.g., α-chain, β-chain) contain two immunoglobulin domains, a variable domain (e.g., α-chain variable domain or Vα, β-chain variable domain or Vβ; typically amino acids 1 to 116 based on Kabat numbering (Kabat et al., “Sequences of Proteins of Immunological Interest, US Dept. Health and Human Services, Public Health Service National Institutes of Health, 1991, 5th ed.)) at the N-terminus, and one constant domain (e.g., α-chain constant domain or Cα, typically 5 amino acids 117 to 259 based on Kabat, β-chain constant domain or Cβ, typically amino acids 117 to 295 based on Kabat) adjacent the cell membrane. Also, like immunoglobulins, the variable domains contain complementary determining regions (CDRs) separated by framework regions (FRs) (see, e.g., Jores et al., Proc. Nat'l Acad. Sci. USA 87:9138, 1990; Chothia et al., EMBO J. 7:3745, 1988; see also Lefranc et al., Dev. Comp. Immunol. 27:55, 2003). The source of a TCR as used in the present disclosure may be from various animal species, such as a human, non-human primate, mouse, rat, rabbit, or other mammal.

[0452] The term “variable region” or “variable domain” refers to the structural domain of an immunoglobulin superfamily binding protein (e.g., a TCR α-chain or β-chain (or γ chain and δ chain for γδ TCRs)) that is involved in specific binding of the immunoglobulin superfamily binding protein (e.g., TCR) to antigen. The variable domains of the a chain and β chain (Vα and Vβ, respectively) of a native TCR generally have similar structures, with each domain comprising four generally conserved framework regions (FRs) and three CDRs. The Vα domain is encoded by two separate DNA segments, the variable gene segment and the joining gene segment (V-J); the Vβ domain is encoded by three separate DNA segments, the variable gene segment, the diversity gene segment, and the joining gene segment (V-D-J). A single Vα or Vβ domain may be sufficient to confer antigen-binding specificity. Furthermore, TCRs that bind a particular antigen may be isolated using a Vα or Vβ domain from a TCR that binds the antigen to screen a library of complementary Vα or Vβ domains, respectively.

[0453] The terms “complementarity determining region,” and “CDR,” are synonymous with “hypervariable region” or “HVR,” and are known in the art to refer to sequences of amino acids within immunoglobulin (e.g., TCR) variable regions, which confer antigen specificity and/or binding affinity and are separated from one another in primary amino acid sequence by framework regions. In general, there are three CDRs in each TCR α-chain variable region (αCDR1, αCDR2, αCDR3) and three CDRs in each TCR β-chain variable region (βCDR1, βCDR2, βCDR3). In TCRs, CDR3 is thought to be the main CDR responsible for recognizing processed antigen. In general, CDR1 and CDR2 interact mainly or exclusively with the MHC.

[0454] CDR1 and CDR2 are encoded within the variable gene segment of a TCR variable region-coding sequence, whereas CDR3 is encoded by the region spanning the variable and joining segments for Vα, or the region spanning variable, diversity, and joining segments for Vβ. Thus, if the identity of the variable gene segment of a Vα or Vβ is known, the sequences of their corresponding CDR1 and CDR2 can be deduced; e.g., according to a numbering scheme as described herein. Compared with CDR1 and CDR2, CDR3 is typically significantly more diverse due to the addition and loss of nucleotides during the recombination process.

[0455] TCR variable domain sequences can be aligned to a numbering scheme (e.g., Kabat, Chothia, EU, IMGT, Enhanced Chothia, and Aho), allowing equivalent residue positions to be annotated and for different molecules to be compared using, for example, ANARCI software tool (2016, Bioinformatics 15:298-300). A numbering scheme provides a standardized delineation of framework regions and CDRs in the TCR variable domains. In certain embodiments, a CDR of the present disclosure is identified according to the IMGT numbering scheme (Lefranc et al., Dev. Comp. Immunol. 27:55, 2003; imgt.org/IMGTindex/V-QUEST.php).

[0456] The ability of TCRs to specifically bind a cognate epitope or antigen may be described in terms of affinity, as described above, or avidity. As used herein, “avidity” can refer to a functional activity induced by an interaction between a TCR expressed on a T cell with an antigen, such as a MHC Class II-peptide complex comprising an antigen on an antigen presenting cell. Relative avidity of a TCR to an antigen can include the level of proliferation induced in a cell expressing the TCR when the TCR binds to the antigen. In one example, a dose-response curve and the measurement of proliferation as shown in FIG. 156A, panel A can be utilized to determine avidity of a TCR for an epitope or antigen. There are multiple ways to assess TCR avidity for a MHC-peptide complex. In one example, a functional definition of avidity can be based on the proliferative response of a T cell expressing the TCR of interest when co-cultured with an antigen presenting cell. In another example, proliferation is measured with dye dilution at 4-6 days. In another example, proliferation is measured with H3-Thymidine incorporation. In another example, proliferation is measured with expression of Ki67. In another example, relative avidity is determined by comparison to an established TCR known to be of high avidity.

[0457] As used herein, “CD4” is an immunoglobulin co-receptor glycoprotein that assists the TCR in communicating with antigen-presenting cells (see, Campbell & Reece, Biology 909 (Benjamin Cummings, Sixth Ed., 2002)). CD4 is found on the surface of immune cells such as T helper cells, monocytes, macrophages, and dendritic cells, and includes four immunoglobulin domains (D1 to D4) that are expressed at the cell surface. During antigen presentation, CD4 is recruited, along with the TCR complex, to bind to different regions of the MHC class II molecule (CD4 binds MHCII β2, while the TCR complex binds MHCII α1/β1). Without wishing to be bound by theory, it is believed that close proximity to the TCR complex allows CD4-associated kinase molecules to phosphorylate the immunoreceptor tyrosine activation motifs (ITAMs) present on the cytoplasmic domains of CD3. This activity is thought to amplify the signal generated by the activated TCR in order to produce or recruit various types of immune system cells, including T helper cells, and to promote immune responses.

[0458] As used herein “CD8” can refer to a transmembrane glycoprotein that serves as a co-receptor for the TCR. Along with the TCR, the CD8 co-receptor plays a role in T cell signaling and aiding with cytotoxic T cell antigen interactions. Like the TCR, CD8 binds to a MHC molecule, but is specific for the MHC class I protein. To function, CD8 forms a dimer, including a pair of CD8 chains. The most common form of CD8 is composed of a CD8-α and CD8-β chain. The extracellular IgV-like domain of CD8-α interacts with the a3 portion of the Class I MHC molecule. This affinity keeps the T cell receptor of the cytotoxic T cell and the target cell bound closely together during antigen-specific activation.

[0459] In certain embodiments, a TCR is found on the surface of T cells (or T lymphocytes) and associates with a CD3 complex. “CD3” is a multi-protein complex of six chains (see, Abbas and Lichtman, 2003; Janeway et al., p. 172 and 178, 1999) that is associated with antigen signaling in T cells. In mammals, the complex comprises a CD3γ chain, a CD36 chain, two CD3ε chains, and a homodimer of CD3ζ chains. The CD3γ, CD3β, and CD3ε chains are related cell surface proteins of the immunoglobulin superfamily containing a single immunoglobulin domain. The transmembrane regions of the CD3γ, CD3β, and CD3ε chains are negatively charged, which is believed to allow these chains to associate with positively charged regions of T cell receptor chains. The intracellular tails of the CD3γ, CD3β, and CD3ε chains each contain a single conserved motif known as an immunoreceptor tyrosine-based activation motif or ITAM, whereas each CD3ζ (chain has three such motifs. Without wishing to be bound by theory, it is believed that the ITAMs are important for the signaling capacity of a TCR complex. CD3 as used in the present disclosure may be from various animal species, including human, non-human primate, mouse, rat, or other mammals.

[0460] As used herein, “TCR complex” refers to a complex formed by the association of CD3 with TCR. For example, a TCR complex can be composed of a CD3γ chain, a CD3β chain, two CD3ε chains, a homodimer of CD3ζ (chains, a TCRα chain, and a TCRβ chain. Alternatively, a TCR complex can be composed of a CD3γ chain, a CD3β chain, two CD3ε chains, a homodimer of CD3ζ (chains, a TCRγ chain, and a TCRβ chain.

[0461] A “component of a TCR complex”, as used herein, refers to a TCR chain (i.e., TCRα, TCRβ, TCRγ or TCRδ), a CD3 chain (i.e., CD3γ, CD3δ, CD3ε or CD3ζ), or a complex formed by two or more TCR chains or CD3 chains (e.g., a complex of TCRα and TCRβ, a complex of TCRγ and TCRδ, a complex of CD3ε and CD3δ, a complex of CD3γ and CD3ε, or a sub-TCR complex of TCRα, TCRβ, CD3γ, CD3δ, and two CD3ε chains).

[0462] As used herein, “chimeric antigen receptor” (CAR) refers to a fusion protein that is engineered to contain two or more naturally occurring amino acid sequences, domains, or motifs, linked together in a way that does not occur naturally or does not occur naturally in a host cell, which fusion protein can function as a receptor when present on a surface of a cell such as a T cell. CARs can include an extracellular portion comprising an antigen-binding domain (e.g., obtained or derived from an immunoglobulin or immunoglobulin-like molecule, such as a TCR antigen binding domain derived or obtained from a TCR specific for an autoantigen, an allergen, or an inflammatory disease-associated antigen, a scFv derived or obtained from an antibody, or an antigen-binding domain derived or obtained from a killer immunoreceptor from an NK cell) linked to a transmembrane domain and one or more intracellular signaling domains (optionally containing co-stimulatory domain(s)) (see, e.g., Sadelain et al., Cancer Discov., 3(4):388 (2013); see also Harris and Kranz, Trends Pharmacol. Sci., 37(3):220 (2016), Stone et al., Cancer Immunol. Immunother., 63(11):1163 (2014), and Walseng et al., Scientific Reports 7:10713 (2017), which CAR constructs and methods of making the same are incorporated by reference herein). Methods and compostions disclosed in the following publication can be useful with embodiments provided herein: U.S. patent Ser. No. 10/865,242 which is incorporated by reference in its entirety.

[0463] Many polypeptides may, as encoded by a polynucleotide sequence, comprise a “signal peptide” (also known as a leader sequence, leader peptide, or transit peptide). Signal peptides target newly synthesized polypeptides to their appropriate location inside or outside the cell. A signal peptide may be removed from the polypeptide during biosynthesis or after subcellular localization or extracellular secretion of the polypeptide is completed. Polypeptides that have a signal peptide are referred to herein as a “pre-protein” and polypeptides having their signal peptide removed are referred to herein as “mature” proteins or polypeptides.

[0464] A “linker” refers to an amino acid sequence that connects two proteins, polypeptides, peptides, domains, regions, or motifs and may provide a spacer function compatible with interaction of the two sub-binding domains so that the resulting polypeptide retains a specific binding affinity (e.g., scTCR) to a target molecule or retains signaling activity (e.g., TCR complex). In certain embodiments, a linker is comprised of about two to about 35 amino acids or 2-35 amino acids, for instance, about four to about 20 amino acids or 4-20 amino acids, about eight to about 15 amino acids or 8-15 amino acids, about 15 to about 25 amino acids or 15-25 amino acids. Exemplary linkers include glycine-serine linkers as are known in the art.

[0465] Exemplary TCR V region sequences and nucleic acid sequences coding therefor are disclosed herein, including in the Examples and Drawings, for TCR that specifically recognize antigens associated with autoimmune, allergic, and inflammatory conditions as provided herein. Also disclosed herein, including in the Examples and Drawings, are polypeptide sequences containing TCR-recognized antigenic epitopes of antigens associated with autoimmune, allergic, and inflammatory conditions as provided herein.

[0466] An “antigen” typically refers to an immunogenic molecule that provokes an immune response. This immune response may involve production of antibodies that specifically bind to the antigen, activation of specific immunologically competent cells (e.g., T cells such as T-helper, T-effector, Treg, etc.), or both. Although an antigen may frequently be thought of as a “non-self” structure to which a host immune system responds by recognizing the antigen as foreign, in the present disclosure “antigen” is not intended to be so limited and may in certain embodiments also include any autoantigen, which refers to a “self” molecular, cellular, organ, or tissue structure to which a host immune system may react inappropriately in the context of autoimmune disease. An antigen (immunogenic molecule) may be, for example, a peptide, glycopeptide, polypeptide, glycopolypeptide, polynucleotide, polysaccharide, lipid or the like. It is readily apparent that an antigen can be synthesized artificially, produced recombinantly, or derived from a biological sample. Exemplary biological samples that can contain one or more antigens include tissue samples, cells, biological fluids, biopsies, primary cultures, or combinations thereof. Antigens can be produced by cells that have been modified or genetically engineered to express an antigen, or that endogenously (e.g., without modification or genetic engineering by human intervention) express a mutation or polymorphism that is immunogenic.

[0467] In certain embodiments a T cell as provided herein may be used as a host cell that may be modified to include one or more heterologous polynucleotides comprising regulatory sequences (e.g., promoters, enhancers, etc.) and/or nucleic acid sequences encoding a desired TCR and/or nucleic acid sequences encoding all or a portion of a FoxP3 transcription factor as described herein. Methods for transfecting/transducing T cells with desired nucleic acids have been described (e.g., U.S. Patent Application Pub. No. US 2004/0087025) as have adoptive transfer procedures using T cells of desired target-specificity (e.g., Schmitt et al., Hum. Gen. 20:1240, 2009; Dossett et al., Mol. Ther. 17:742, 2009; Till et al., Blood 112:2261, 2008; Wang et al., Hum. Gene Ther. 18:712, 2007; Kuball et al., Blood 109:2331, 2007; US 2011/0243972; US 2011/0189141; Leen et al., Ann. Rev. Immunol. 25:243, 2007), such that adaptation of these methodologies to the presently disclosed embodiments is contemplated, based on the teachings herein. Particularly preferred embodiments relate to artificial modification of a T cell genome by targeted gene editing as described herein.

[0468] Any appropriate method can be used to transfect or transduce the cells, for example, the T cells, or to administer the polynucleotides or compositions of the present methods. Known methods for delivering polynucleotides to host cells include, for example, use of cationic polymers, lipid-like molecules, and certain commercial products such as, for example, IN-VIVO-JET PEI. Other methods include ex vivo transduction, injection, electroporation, DEAE-dextran, sonication loading, liposome-mediated transfection, receptor-mediated transduction, microprojectile bombardment, transposon-mediated transfer, and the like. Transposon-based systems are described in Woodard L. E. et al. (2012) PLoS ONE 7(11): e42666; and Amberger M. et al., (2020) BioEssays 42: 20000136, which are each incorporated by reference in its entirety. Still further methods of transfecting or transducing host cells employ vectors, as also described herein and known to the art.

[0469] A nucleic acid may comprise DNA or RNA and may be wholly or partially synthetic. Reference to a nucleotide sequence as set out herein encompasses a DNA molecule with the specified sequence and encompasses an RNA molecule with the specified sequence in which U is substituted for T, unless context requires otherwise. The term “isolated polynucleotide” as used herein shall mean a polynucleotide of genomic, cDNA, or synthetic origin or some combination thereof, wherein by virtue of its origin the isolated polynucleotide (1) is not associated with all or a portion of a polynucleotide in which the isolated polynucleotide is found in nature, (2) is linked to a polynucleotide to which it is not linked in nature, or (3) does not occur in nature as part of a larger sequence. In some embodiments, a nucleic acid is comprised within a polynucleotide.

[0470] The term “operably linked” means that the components to which the term is applied are in a relationship that allows them to carry out their inherent functions under suitable conditions. For example, a transcription control sequence “operably linked” to a protein coding sequence is ligated thereto so that expression of the protein coding sequence is achieved under conditions compatible with the transcriptional activity of the control sequences.

[0471] The term “control sequence” as used herein refers to polynucleotide sequences that can affect expression, processing or intracellular localization of coding sequences to which they are ligated or operably linked. The nature of such control sequences may depend upon the host organism. In particular embodiments, transcription control sequences for prokaryotes may include a promoter, ribosomal binding site, and transcription termination sequence. In other particular embodiments, transcription control sequences for eukaryotes may include promoters comprising one or a plurality of recognition sites for transcription factors, transcription enhancer sequences, transcription termination sequences and polyadenylation sequences. In certain embodiments, “control sequences” can include leader sequences and/or fusion partner sequences.

[0472] The term “polynucleotide” as referred to herein means single-stranded or double-stranded nucleic acid polymers. In certain embodiments, the nucleotides comprising the polynucleotide can be ribonucleotides or deoxyribonucleotides or a modified form of either type of nucleotide. Such modifications may include base modifications such as bromouridine, ribose modifications such as arabinoside and 2′,3′-dideoxyribose and internucleotide linkage modifications such as phosphorothioate, phosphorodithioate, phosphoroselenoate, phosphorodiselenoate, phosphoroanilothioate, phoshoraniladate or phosphoroamidate. The term “polynucleotide” specifically includes single and double stranded forms of DNA. In some embodiments, a polynucleotide comprises one or more nucleic acids (e.g., a stretch of consecutives nucleotides or base pairs) that encode one or more polypeptides.

[0473] The term “naturally occurring nucleotides” includes deoxyribonucleotides and ribonucleotides. The term “modified nucleotides” includes nucleotides with modified or substituted sugar groups and the like. The term “oligonucleotide linkages” includes oligonucleotide linkages such as phosphorothioate, phosphorodithioate, phosphoroselenoate, phosphorodiselenoate, phosphoroanilothioate, phoshoraniladate, or phosphoroamidate, and the like. See, e.g., LaPlanche et al., 1986, Nucl. Acids Res., 14:9081; Stec et al., 1984, J. Am. Chem. Soc., 106:6077; Stein et al., 1988, Nucl. Acids Res., 16:3209; Zon et al., 1991, Anti-Cancer Drug Design, 6:539; Zon et al., 1991, OLIGONUCLEOTIDES AND ANALOGUES: A PRACTICAL APPROACH, pp. 87-108 (F. Eckstein, Ed.), Oxford University Press, Oxford England; Stec et al., U.S. Pat. No. 5,151,510; Uhlmann and Peyman, 1990, Chemical Reviews, 90:543, the disclosures of which are hereby expressly incorporated by reference in their entireties. An oligonucleotide can include a detectable label to enable detection of the oligonucleotide or hybridization thereof.

[0474] The term “vector” is used to refer to any molecule (e.g., nucleic acid, plasmid, or virus) used to transfer coding information to a host cell. The term “expression vector” refers to a vector that is suitable for transformation of a host cell and contains nucleic acid sequences that direct and/or control expression of inserted heterologous nucleic acid sequences. Expression includes, but is not limited to, processes such as transcription, translation, and RNA splicing, if introns are present. Non-limiting examples of vectors include artificial chromosomes, minigenes, cosmids, plasmids, phagemids, and viral vectors. Non-limiting examples of viral vectors include lentiviral vectors, retroviral vectors, herpesvirus vectors, adenovirus vectors, and adeno-associated viral vectors. In some embodiments, one or more vectors comprising nucleic acids for use in the methods provided herein are lentiviral vectors. In some embodiments, one or more vectors are adenoviral vectors. In some embodiments, one or more vectors are adeno-associated viral (AAV) vectors. In some embodiments, one or more AAV vectors are AAV5 vectors. In some embodiments, one or more AAV vectors are AAV6 vectors.

[0475] As will be understood by those skilled in the art, nucleic acid may include genomic sequences, extra-genomic and plasmid-encoded sequences and smaller engineered gene segments that express, or may be adapted to express, proteins, polypeptides, peptides and the like. Such segments may be naturally isolated or modified synthetically by the skilled person.

[0476] As will be also recognized by the skilled artisan, polynucleotides may be single-stranded (coding or antisense) or double-stranded, and may be DNA (genomic, cDNA or synthetic) or RNA molecules. RNA molecules may include HnRNA molecules, which contain introns and correspond to a DNA molecule in a one-to-one manner, and mRNA molecules, which do not contain introns. Additional coding or non-coding sequences may, but need not, be present within a polynucleotide according to the present disclosure, and a polynucleotide may, but need not, be linked to other molecules and/or support materials. Polynucleotides may comprise a native sequence or may comprise a sequence encoding a variant or derivative of such a sequence.

[0477] In other related embodiments, polynucleotide variants may have substantial identity to a polynucleotide sequence encoding an immunomodulatory polypeptide described herein. For example, a polynucleotide may be a polynucleotide comprising at least 70% sequence identity, preferably at least 75%, 80%, 85%, 90%, 95%, 96%, 97%, 98%, or 99% or higher, sequence identity or a sequence identity that is within a range defined by any two of the aforementioned percentages as compared to a reference polynucleotide sequence such as a sequence encoding an antibody described herein, using the methods described herein, (e.g., BLAST analysis using standard parameters, as described below). One skilled in this art will recognize that these values can be appropriately adjusted to determine corresponding identity of proteins encoded by two nucleotide sequences by taking into account codon degeneracy, amino acid similarity, reading frame positioning and the like.

[0478] Typically, polynucleotide variants will contain one or more substitutions, additions, deletions and/or insertions, preferably such that the binding affinity of a polypeptide variant of a given polypeptide which is capable of a specific binding interaction with another molecule and is encoded by the variant polynucleotide is not substantially diminished relative to a polypeptide encoded by a polynucleotide sequence specifically set forth herein.

[0479] In certain other related embodiments, polynucleotide fragments may comprise or consist essentially of various lengths of contiguous stretches of sequence identical to or complementary to a sequence encoding a polypeptide as described herein. For example, polynucleotides are provided that comprise or consist essentially of at least or at least about 5, 6, 7, 8, 9, 10, 11, 12, 13, 14, 15, 16, 17, 18, 19, 20, 21, 22, 23, 24, 25, 26, 27, 28, 29, 30, 31, 32, 33, 34, 35, 36, 37, 38, 39, 40, 45, 50, 55, 60, 65, 70, 75, 80, 85, 90, 95, 100, 110, 120, 130, 140, 150, 200, 300, 400, 500 or 1000 or more contiguous nucleotides of a sequences the encodes a polypeptide, or variant thereof, disclosed herein, as well as, all intermediate lengths there between. It will be readily understood that “intermediate lengths”, in this context, means any length between the quoted values, such as 50, 51, 52, 53, etc.; 100, 101, 102, 103, etc.; 150, 151, 152, 153, etc.; including all integers through 200-500; 500-1,000, and the like. A polynucleotide sequence as described here may be extended at one or both ends by additional nucleotides not found in the native sequence. This additional sequence may consist of 1, 2, 3, 4, 5, 6, 7, 8, 9, 10, 11, 12, 13, 14, 15, 16, 17, 18, 19, or 20 nucleotides at either end of a polynucleotide encoding a polypeptide described herein or at both ends of a polynucleotide encoding a polypeptide described herein.

[0480] In another embodiment, polynucleotides are provided that are capable of hybridizing under moderate to high stringency conditions to a polynucleotide sequence encoding a polypeptide, or variant thereof, provided herein, or a fragment thereof, or a complementary sequence thereof. Hybridization techniques are well known in the art of molecular biology. For purposes of illustration, suitable moderately stringent conditions for testing the hybridization of a polynucleotide as provided herein with other polynucleotides include prewashing in a solution of 5× SSC, 0.5% SDS, 1.0 mM EDTA (pH 8.0); hybridizing at 50° C.-60° C., 5× SSC, overnight; followed by washing twice at 65° C. for 20 minutes with each of 2×, 0.5× and 0.2× SSC containing 0.1% SDS. One skilled in the art will understand that the stringency of hybridization can be readily manipulated, such as by altering the salt content of the hybridization solution and/or the temperature at which the hybridization is performed. For example, in another embodiment, suitable highly stringent hybridization conditions include those described above, with the exception that the temperature of hybridization is increased, e.g., to 60° C.-65° C. or 65° C. 70° C.

[0481] The polynucleotides described herein, or fragments thereof, regardless of the length of the coding sequence itself, may be combined with other DNA sequences, such as promoters, polyadenylation signals, additional restriction enzyme sites, multiple cloning sites, other coding segments, and the like, such that their overall length may vary considerably. It is therefore contemplated that a nucleic acid fragment of almost any length may be employed, with the total length preferably being limited by the ease of preparation and use in the intended recombinant DNA protocol. For example, illustrative polynucleotide segments with total lengths of or about of 10,000, 5000, 3000, 2,000, 1,000, 500, 200, 100, or 50 base pairs in length, and the like, (including all intermediate lengths) are contemplated to be useful.

[0482] When comparing polynucleotide or nucleic acid sequences, two sequences are said to be “identical” if the sequence of nucleotides in the two sequences is the same when aligned for maximum correspondence, as described below. Comparisons between two sequences are typically performed by comparing the sequences over a comparison window to identify and compare local regions of sequence similarity. A “comparison window” as used herein, refers to a segment of at least or at least about 20 contiguous positions, usually 30 to 75, or 40 to 50, in which a sequence may be compared to a reference sequence of the same number of contiguous positions after the two sequences are optimally aligned.

[0483] Optimal alignment of sequences for comparison may be conducted using the Megalign program in the Lasergene suite of bioinformatics software (DNASTAR, Inc., Madison, WI), using default parameters. This program embodies several alignment schemes described in the following references: Dayhoff, M. O. (1978) A model of evolutionary change in proteins—Matrices for detecting distant relationships. In Dayhoff, M. O. (ed.) Atlas of Protein Sequence and Structure, National Biomedical Research Foundation, Washington DC Vol. 5, Suppl. 3, pp. 345-358; Hein J., Unified Approach to Alignment and Phylogenes, pp. 626-645 (1990); Methods in Enzymology vol. 183, Academic Press, Inc., San Diego, CA; Higgins, D. G. and Sharp, P. M., CABIOS 5:151-153 (1989); Myers, E. W. and Muller W., CABIOS 4:11-17 (1988); Robinson, E. D., Comb. Theor 11:105 (1971); Santou, N. Nes, M., Mol. Biol. Evol. 4:406-425 (1987); Sneath, P. H. A. and Sokal, R. R., Numerical Taxonomy—the Principles and Practice of Numerical Taxonomy, Freeman Press, San Francisco, CA (1973); Wilbur, W. J. and Lipman, D. J., Proc. Natl. Acad., Sci. USA 80:726-730 (1983).

[0484] Alternatively, optimal alignment of sequences for comparison may be conducted by the local identity algorithm of Smith and Waterman, Add. APL. Math 2:482 (1981), by the identity alignment algorithm of Needleman and Wunsch, J. Mol. Biol. 48:443 (1970), by the search for similarity methods of Pearson and Lipman, Proc. Natl. Acad. Sci. USA 85: 2444 (1988), by computerized implementations of these algorithms (GAP, BESTFIT, BLAST, FASTA, and TFASTA in the Wisconsin Genetics Software Package, Genetics Computer Group (GCG), 575 Science Dr., Madison, WI), or by inspection.

[0485] One preferred example of algorithms that are suitable for determining percent sequence identity and sequence similarity are the BLAST and BLAST 2.0 algorithms, which are described in Altschul et al., Nucl. Acids Res. 25:3389-3402 (1977), and Altschul et al., J. Mol. Biol. 215:403-410 (1990), respectively. BLAST and BLAST 2.0 can be used, for example with the parameters described herein, to determine percent sequence identity among two or more the polynucleotides. Software for performing BLAST analyses is publicly available through the National Center for Biotechnology Information. In one illustrative example, cumulative scores can be calculated using, for nucleotide sequences, the parameters M (reward score for a pair of matching residues; always >0) and N (penalty score for mismatching residues; always <0). Extension of the word hits in each direction are halted when: the cumulative alignment score falls off by the quantity X from its maximum achieved value; the cumulative score goes to zero or below, due to the accumulation of one or more negative-scoring residue alignments; or the end of either sequence is reached. The BLAST algorithm parameters W, T and X determine the sensitivity and speed of the alignment. The BLASTN program (for nucleotide sequences) uses as defaults a wordlength (W) of 11, and expectation (E) of 10, and the BLOSUM62 scoring matrix (see Henikoff and Henikoff, Proc. Natl. Acad. Sci. USA 89:10915 (1989)) alignments, (B) of 50, expectation (E) of 10, M=5, N=−4 and a comparison of both strands.

[0486] In certain embodiments, the “percentage of sequence identity” is determined by comparing two optimally aligned sequences over a window of comparison of at least 20 positions, wherein the portion of the polynucleotide sequence in the comparison window may comprise additions or deletions (i.e., gaps) of 20 percent or less, usually 5 to 15 percent, or 10 to 12 percent, as compared to the reference sequences (which does not comprise additions or deletions) for optimal alignment of the two sequences. The percentage is calculated by determining the number of positions at which the identical nucleic acid bases occurs in both sequences to yield the number of matched positions, dividing the number of matched positions by the total number of positions in the reference sequence (i.e., the window size) and multiplying the results by 100 to yield the percentage of sequence identity.

[0487] It will be appreciated by those of ordinary skill in the art that, as a result of the degeneracy of the genetic code, there are many nucleotide sequences that encode a FoxP3, TCR, or antigenic peptide as described herein, or an antibody that specifically binds to such a peptide, as described herein. Some of these polynucleotides bear minimal sequence identity to the nucleotide sequence of the native or original polynucleotide sequence that encode FoxP3, TCR, or antigenic polypeptides described herein. Nonetheless, polynucleotides that vary due to differences in codon usage are expressly contemplated by the present disclosure. In certain embodiments, sequences that have been codon-optimized for mammalian expression are specifically contemplated.

[0488] Therefore, in another embodiment of the invention, a mutagenesis approach, such as site-specific mutagenesis, may be employed for the preparation of variants and/or derivatives of the FoxP3, TCR, or antigenic polypeptides described herein. By this approach, specific modifications in a polypeptide sequence can be made through mutagenesis of the underlying polynucleotides or nucleic acids that encode them. These techniques provide a straightforward approach to prepare and test sequence variants, for example, incorporating one or more of the foregoing considerations, by introducing one or more nucleotide sequence changes into the polynucleotide.

[0489] Site-specific mutagenesis allows the production of mutants through the use of specific oligonucleotide sequences which encode the DNA sequence of the desired mutation, as well as a sufficient number of adjacent nucleotides, to provide a primer sequence of sufficient size and sequence complexity to form a stable duplex on both sides of the deletion junction being traversed. Mutations may be employed in a selected polynucleotide sequence to improve, alter, decrease, modify, or otherwise change the properties of the polynucleotide itself, and/or alter the properties, activity, composition, stability, or primary sequence of the encoded polypeptide.

[0490] In certain embodiments, the inventors contemplate the mutagenesis of the polynucleotide sequences or nucleic acids that encode a FoxP3, TCR, or antigenic polypeptide disclosed herein, or a variant thereof, to alter one or more properties of the encoded polypeptide, such as (e.g., for TCR or antigenic peptides) the binding affinity of the peptide or the variant thereof for a cognate ligand, or (e.g., for FoxP3) the immunosuppressive effects. The techniques of site-specific mutagenesis are well-known in the art and are widely used to create variants of both polypeptides and polynucleotides. For example, site-specific mutagenesis is often used to alter a specific portion of a DNA molecule. In such embodiments, a primer comprising typically 14 to 25 nucleotides or about 14 to about 25 nucleotides or so in length is employed, with about 5 to about 10 residues or 5 to 10 residues on both sides of the junction of the sequence being altered.

[0491] As will be appreciated by those of skill in the art, site-specific mutagenesis techniques have often employed a phage vector that exists in both a single stranded and double stranded form. Typical vectors useful in site-directed mutagenesis include vectors such as the M13 phage. These phage are readily commercially-available and their use is generally well-known to those skilled in the art. Double-stranded plasmids are also routinely employed in site directed mutagenesis that eliminates the step of transferring the gene of interest from a plasmid to a phage.

[0492] In general, site-directed mutagenesis in accordance herewith is performed by first obtaining a single-stranded vector or melting apart of two strands of a double-stranded vector that includes within its sequence a DNA sequence encoding the desired peptide. An oligonucleotide primer bearing the desired mutated sequence is prepared, generally synthetically. This primer is then annealed with the single-stranded vector and subjected to DNA polymerizing enzymes such as E. coli polymerase I Klenow fragment, in order to complete the synthesis of the mutation-bearing strand. Thus, a heteroduplex is formed wherein one strand encodes the original non-mutated sequence and the second strand bears the desired mutation. This heteroduplex vector is then used to transform appropriate cells, such as E. coli cells, and clones are selected which include recombinant vectors bearing the mutated sequence arrangement.

[0493] The preparation of sequence variants of the selected peptide-encoding DNA segments using site-directed mutagenesis provides a means of producing potentially useful species and is not meant to be limiting as there are other ways in which sequence variants of peptides and the DNA sequences encoding them may be obtained. For example, recombinant vectors encoding the desired peptide sequence may be treated or contacted with mutagenic agents, such as hydroxylamine, to obtain sequence variants. Specific details regarding these methods and protocols are found in the teachings of Maloy et al., 1994; Segal, 1976; Prokop and Bajpai, 1991; Kuby, 1994; and Maniatis et al., 1982, each incorporated herein by reference, for that purpose.

[0494] As used herein, the term “oligonucleotide directed mutagenesis procedure” refers to template-dependent processes and vector-mediated propagation which result in an increase in the concentration of a specific nucleic acid molecule relative to its initial concentration, or in an increase in the concentration of a detectable signal, such as amplification. As used herein, the term “oligonucleotide directed mutagenesis procedure” is intended to refer to a process that involves the template-dependent extension of a primer molecule. The term template dependent process refers to nucleic acid synthesis of an RNA or a DNA molecule wherein the sequence of the newly synthesized strand of nucleic acid is dictated by the well-known rules of complementary base pairing (see, for example, Watson, 1987). Typically, vector mediated methodologies involve the introduction of the nucleic acid fragment into a DNA or RNA vector, the clonal amplification of the vector, and the recovery of the amplified nucleic acid fragment. Examples of such methodologies are provided by U.S. Pat. No. 4,237,224, expressly incorporated herein by reference in its entirety.

[0495] In another approach for the production of polypeptide variants, recursive sequence recombination, as described in U.S. Pat. No. 5,837,458, which is expressly incorporated by reference in its entirety, may be employed. In this approach, iterative cycles of recombination and screening or selection are performed to “evolve” individual polynucleotide variants having, for example, increased binding affinity. Certain embodiments also provide constructs in the form of plasmids, vectors, transcription or expression cassettes which comprise at least one polynucleotide as described herein.

[0496] It will be appreciated that the practice of the several embodiments of the present invention will employ, unless indicated specifically to the contrary, conventional methods in virology, immunology, microbiology, molecular biology and recombinant DNA techniques that are within the skill of the art, and many of which are described below for the purpose of illustration. Such techniques are explained fully in the literature. See, e.g., Current Protocols in Molecular Biology or Current Protocols in Immunology, John Wiley & Sons, New York, N.Y. (2009); Ausubel et al., Short Protocols in Molecular Biology, 3rd ed., Wiley & Sons, 1995; Sambrook and Russell, Molecular Cloning: A Laboratory Manual (3rd Edition, 2001); Maniatis et al. Molecular Cloning: A Laboratory Manual (1982); DNA Cloning: A Practical Approach, vol. I & II (D. Glover, ed.); Oligonucleotide Synthesis (N. Gait, ed., 1984); Nucleic Acid Hybridization (B. Hames & S. Higgins, eds., 1985); Transcription and Translation (B. Hames & S. Higgins, eds., 1984); Animal Cell Culture (R. Freshney, ed., 1986); Perbal, A Practical Guide to Molecular Cloning (1984) which are each incorporated by reference in its entirety.

[0497] Standard techniques may be used for recombinant DNA, oligonucleotide synthesis, and tissue culture and transformation (e.g., electroporation, lipofection). Enzymatic reactions and purification techniques may be performed according to manufacturer's specifications or as commonly accomplished in the art or as described herein. These and related techniques and procedures may be generally performed according to conventional methods well known in the art and as described in various general and more specific references that are cited and discussed throughout the present specification. Unless specific definitions are provided, the nomenclature utilized in connection with, and the laboratory procedures and techniques of, molecular biology, analytical chemistry, synthetic organic chemistry, and medicinal and pharmaceutical chemistry described herein are those well-known and commonly used in the art. Standard techniques may be used for recombinant technology, molecular biological, microbiological, chemical syntheses, chemical analyses, pharmaceutical preparation, formulation, and delivery, and treatment of patients.

### Autoimmune, Allergic, and Inflammatory Conditions and Associated Antigens

[0498] As noted above, the present airT cells may find uses in the treatment, inhibition, and/or amelioration of certain autoimmune, allergic, and inflammatory conditions. Clinical signs and symptoms of, and diagnostic criteria for, such conditions are known in the art. Non-limiting examples of such conditions for which the present airT cells may be beneficially administered to a human patient or other mammalian host in need of antigen-specific immunosuppression, which may refer to an individual in whom there may be present a clinically inappropriate array of pro-inflammatory mediators (e.g., cytokines, lymphokines, hormones, and the like) and/or locally or systemically elevated levels of inflammatory cells, include: type 1 diabetes mellitus, multiple sclerosis, systemic lupus erythematosus, myasthenia gravis, rheumatoid arthritis, Crohn's disease, inflammatory bowel disease, bullous pemphigoid, pemphigus vulgaris, autoimmune hepatitis, asthma, allergy (e.g., specific hypersensitivity to food, plant, animal, environmental, drug, chemical, or other allergens), tolerance induction for transplantation (e.g., pancreatic islet cell transplantation), or graft-versus-host disease (GVHD) following stem cell (e.g., hematopoietic SC) transplantation, and the like. In some embodiments, airT cells are used for treating primary biliary cholangitis. In some embodiments, airT cells are used for treating primary sclerosing cholangitis. In some embodiments, airT cells are used for treating autoimmune hepatitis. In some embodiments, airT cells are used for treating type 1 diabetes. In some embodiments, airT cells are used for treating islet cell transplantation. In some embodiments, airT cells are used for treating transplant rejection. In some embodiments, airT cells are used for treating multiple sclerosis. In some embodiments, airT cells are used for treating inflammatory bowel disease. In some embodiments, airT cells are used for treating acute respiratory distress syndrome. In some embodiments, airT cells are used for treating stroke. In some embodiments, airT cells are used for treating graft-versus-host disease.

[0499] Antigens associated with these conditions, and in particular, portions of such antigens in which epitopes recognized by TCR reside, are known and are set forth in the Drawings. Also set forth in the Drawings are TCR V-region sequences of TCR that have been described on the basis of their ability to recognize the herein disclosed antigens associated with autoimmune, allergic, and inflammatory conditions.

[0500] Methods for the identification and characterization of antigens associated with pathogenesis of an autoimmune condition, an allergic condition, or an inflammatory condition, including determination of autoreactive T cell epitopes, are known in the art. For instance, exemplary methods for identifying pancreatic islet autoantigenic polypeptides, including peptide fragments thereof that are recognized by T cells from type 1 diabetes (T1D) subjects, are described in Cerosaletti et al. (2017 J. Immunol. 199:323, which is expressly incorporated by reference in its entirety). Other polypeptide antigens associated with pathogenesis of an autoimmune condition, an allergic condition, or an inflammatory condition, including determination of autoreactive T cell epitopes, are disclosed herein including in the Drawings.

[0501] Cerosaletti et al. (2017) also describe exemplary and non-limiting methodologies for determining the structures of T cell receptors (TCR) that recognize antigens associated with pathogenesis of an autoimmune condition, an allergic condition, or an inflammatory condition. TCR structural features, including partial or complete TCR alpha chain variable (V-alpha) and/or beta chain variable (V-beta) region amino acid sequences and encoding polynucleotide sequences therefor are disclosed herein including in the Drawings for a variety of TCRs specific for different antigens associated with pathogenesis of an autoimmune condition, an allergic condition, or an inflammatory condition.

### Compositions and Methods of Use

[0502] Accordingly, certain presently disclosed embodiments contemplate administration of the herein described airT cells as adoptively transferred immunotherapeutic cells to provide antigen-specific immunosuppression for such a condition in which excessive and/or clinically deleterious antigen-specific immune activity is present. For example, by way of illustration and not limitation, according to certain embodiments there are contemplated immunotherapeutic protocols involving the adoptive transfer to a subject (e.g., a patient having an autoimmune, allergic, or other inflammatory condition) of the presently disclosed airT cells. Adoptive transfer protocols using unselected or selected T cells are known in the art (e.g., Schmitt et al., 2009 Hum. Gen. 20:1240; Dossett et al., 2009 Mol. Ther. 17:742; Till et al., 2008 Blood 112:2261; Wang et al., 2007 Hum. Gene Ther. 18:712; Kuball et al., 2007 Blood 109:2331; US2011/0243972; US2011/0189141; Leen et al., 2007 Ann. Rev. Immunol. 25:243; US2011/0052530, US2010/0310534; Ho et al., 2006 J. Imm. Meth. 310:40; Ho et al., 2003 Canc. Cell 3:431) and may be modified according to the teachings herein for use with transfer cell populations containing desired airT cells generated as described herein.

[0503] Administration of the airT cells can be carried out via any of the accepted modes of administration of agents for serving similar utilities. The airT cells can be prepared in a pharmaceutical composition by combining with an appropriate physiologically acceptable carrier, diluent or excipient, such as an aqueous liquid optionally containing suitable salts, buffers and/or stabilizers. Administration of airT cells may be achieved by a variety of different routes such as intravenous, intrahepatic, intraperitoneal, intragastric, intraarticular, intrathecal, or other routes, and in preferred embodiments by intravenous infusion.

[0504] A dose of airT cells to be administered to a subject may contain any number of cells that are therapeutically effective. In some embodiments a composition administered to a subject comprises 10³-10¹⁵ airT cells. In some embodiments, a composition administered to a subject comprises at least 10³ cells. In some embodiments a composition administered to a subject comprises at least 10 ml of fluid, or 10-200 ml of fluid.

[0505] In some embodiments, any of the methods of treating a disease or condition as disclosed herein, comprises contacting of any one of an airT cell as disclosed herein with a ligand that binds to two CISC components as described herein (e.g., rapamycin or a rapalog). In some embodiments, the contacting of an airT cell with the ligand is performed ex vivo, e.g., to select cells. In some embodiments, contacting of a cell with rapamycin or a rapalog is performed in vivo, e.g., to activate or maintain activity of a cell via the CISC components in the airT cell, and/or to inhibit activity of cells that do not express both CISC components. In some embodiments, cells comprising CISC machinery as described herein and rapamycin or a rapalog are administered to a subject simultaneously. In some embodiments, cells comprising CISC machinery as described herein and rapamycin or a rapalog are administered to a subject sequentially. Thus, in some embodiments, airT cells (e.g., that are administered to a subject) have one or more of the following three mechanisms/activities: (i) expression of Foxp3 that is not diminished under inflammatory conditions (achieved either insertion of a promoter or a promoter and gene-encoding sequence), (ii) expression of a TCR (e.g., in the TRAC locus), and (iii) activity of IL-2 signaling that is driven by CISC components (e.g., a split CISC that is split into being present in the Foxp3 gene/locus and the TCR-encoding gene/locus).

### Methods of Treatment

[0506] The present antigen-specific immunoregulatory T (airT) cell compositions and methods will, in certain embodiments, find uses in the treatment and/or amelioration of certain autoimmune conditions, allergic conditions, and/or inflammatory conditions, including in adoptively transferable immunotherapy, where stable airT cell viability and maintenance of antigen-specific immunoregulatory function provide unprecedented benefits.

[0507] In certain embodiments the airT cell described herein is unexpectedly capable of inducing an antigen-specific immunosuppressive response when stimulated by an antigen associated with pathogenesis of an autoimmune condition, an allergic condition, or an inflammatory condition such as one of the antigens disclosed herein. Such antigen-specifically induced immunosuppression may comprise one or more of: (i) inhibition of either or both of activation and proliferation of effector T cells that recognize the antigen that is specifically recognized by the airT TCR comprising the TCR polypeptide that is encoded by the at least one transduced polynucleotide, (ii) inhibition of expression of inflammatory cytokines or inflammatory mediators by effector T cells that recognize the antigen that is specifically recognized by the airT TCR comprising the TCR polypeptide that is encoded by the at least one transduced polynucleotide (iii) elaboration of one or more immunosuppressive cytokines or anti-inflammatory products, for example, elaboration of one or more inhibitory mechanisms including release of immunosuppressive cytokines or perforin/granzyme, induction of indoleamine 2,3-dioxygenase (IDO), competition for IL2 or adenosine, catabolism of tryptophan, and expression of inhibitory receptors by the airT cell, by the airT cell, and (iv) inhibition of either of or both of activation and proliferation of effector T cells that do not recognize the antigen that is specifically recognized by the airT TCR comprising the TCR polypeptide that is encoded by the at least one transduced polynucleotide, and (v) inhibition of expression of inflammatory cytokines or inflammatory mediators by effector T cells that do not recognize the antigen that is specifically recognized by the airT TCR comprising the TCR polypeptide that is encoded by the at least one transduced polynucleotide, or (vi). In some embodiments such antigenic stimulation of the airT cell is HLA-restricted.

[0508] In some embodiments, the generation of the present airT cells, which stably express FoxP3 as described herein, overcomes certain disadvantages associated with prior methodologies in which FOXP3 transgene expression was achieved by retroviral or lentiviral gene transfer. The resulting virally FoxP3-transduced cell populations were genetically heterogeneous by virtue of having randomly integrated FOXP3 transgenes of varying stability and varying expression levels at various genomic sites. Despite at least transiently exhibiting Treg characteristics such as phenotypic markers and cytokine expression profile, such transduced populations were also potentially compromised by carrying a concomitant risk of genotoxicity, as well as vulnerability to silencing by local regulatory elements at sites of viral integration.

[0509] To avoid these risks, some embodiments provided herein include the use of specifically targeted gene editing for artificial modification of the FOXP3 gene instead of relying on viral FOXP3 gene transfer and, optionally specifically targeted TCR gene editing. Certain embodiments described herein utilize lentiviral gene delivery to introduce candidate autoimmune-related TCRs (or CARs) into T cells, such as CD4 T cells or CD8 T cells, followed by FOXP3 gene editing of the cells to force stable FoxP3 expression. In some related embodiments, this approach is combined with any one of the TRAC locus editing methods disclosed herein, e.g., gene editing methods to simultaneously delete the endogenous TCR gene (e.g., via inactivation, also referred to herein as “knockout”).

[0510] Provided herein are methods comprising administering to a subject a composition of any one the airT cells as described herein. In some embodiments, a method comprises administering to a subject any one of the airT cells as described herein that are made using cells that are isolated from that subject (i.e., autologous cells). In some embodiments, a method comprises administering to a subject any one of the airT cells as described herein that are made using cells that are isolated from a subject that is different from the subject into which the cells are adminstered (e.g, allogeneic cells). In some embodiments, a method comprises (a) isolation of cells from a first subject, (b) contacting the cells with a first polynucleotide and a second polynucleotide respectively comprising a first CISC component and a second CISC component to produce airT cells, and (c) administering to a second subject the airT cells. In some embodiments, the first subject is the same as the second subject. In some embodiments, the first subject is different from the second subject. In some embodiments, the method further comprises administering to the first subject (e.g, before, simultaneously, or subsequently) a ligand that binds to the first and second CISC components. In some embodiments, the ligand is rapamycin or a rapalog.

[0511] In some embodiments, a method comprises administering airT cells to the subject more than once. In some embodiments, airT cells are administered to the subject 2, 3, 4, 5, 6, 7, 8, 9, 10, 11, 12, 13, 14, 15, 16, 17, 18, 19, 20, or more times. In some embodiments, airT cells are administered to a subject that has been diagnosed with (i) an autoimmune condition selected from type 1 diabetes mellitus, multiple sclerosis, systemic lupus erythematosus, myasthenia gravis, rheumatoid arthritis, early onset rheumatoid arthritis, ankylosing spondylitis, immune-mediated pregnancy loss, immune-mediated recurrent pregnancy loss, dermatomyositis psoriatic arthritis, Crohn's disease, inflammatory bowel disease (IBD), ulcerative colitis, bullous pemphigoid, pemphigus vulgaris, autoimmune hepatitis, psoriasis, Sjogren's syndrome, and celiac disease; (ii) an allergic condition selected from allergic asthma, steroid-resistant asthma, atopic dermatitis, celiac disease, pollen allergy, food allergy, drug hypersensitivity, and contact dermatitis; and/or (iii) an inflammatory condition selected from pancreatic islet cell transplantation, asthma, hepatitis, traumatic brain injury, primary sclerosing cholangitis, primary biliary cholangitis, polymyositis, stroke, Still's disease, acute respiratory distress syndrome, uveitis inflammatory bowel disease (IBD), ulcerative colitis, graft-versus-host disease (GVHD), tolerance induction for transplantation, transplant rejection, and sepsis. In some embodiments, the inflammatory condition is primary biliary cholangitis. In some embodiments, the inflammatory condition is primary sclerosing cholangitis. In some embodiments, the inflammatory condition is autoimmune hepatitis. In some embodiments, the autoimmune condition is type 1 diabetes. In some embodiments, the inflammatory condition is islet cell transplantation. In some embodiments, the inflammatory condition is transplant rejection. In some embodiments, the autoimmune condition is multiple sclerosis. In some embodiments, the inflammatory condition is inflammatory bowel disease. In some embodiments, the inflammatory condition is acute respiratory distress syndrome. In some embodiments, the inflammatory condition is stroke. In some embodiments, the inflammatory condition is graft-versus-host disease.

[0512] Preferred modes of administration depend upon the nature of the condition to be treated or prevented, which in certain embodiments will refer to a deleterious or clinically undesirable condition the extent, severity, likelihood of occurrence and/or duration of which may be decreased (e.g., reduced in a statistically significant manner relative to an appropriate control situation such as an untreated control) according to certain methods provided herein. An amount that, following administration, detectably reduces, inhibits, or delays such a condition, for instance, the local or global level autoimmune, allergic, or other harmful inflammatory activity, is considered effective. Persons skilled in the relevant arts will be familiar with any number of diagnostic, surgical and other clinical criteria to which can be adapted to evaluation of the effects of administration by adoptive transfer of the immunoregulatory airT cell compositions described herein. See, e.g., Humar et al., Atlas of Organ Transplantation, 2006, Springer; Kuo et al., Comprehensive Atlas of Transplantation, 2004 Lippincott, Williams & Wilkins; Gruessner et al., Living Donor Organ Transplantation, 2007 McGraw-Hill Professional; Antin et al., Manual of Stem Cell and Bone Marrow Transplantation, 2009 Cambridge University Press; Wingard et al. (Ed.), Hematopoietic Stem Cell Transplantation: A Handbook for Clinicians, 2009 American Association of Blood Banks.

[0513] Accordingly, in some embodiments the airT cell may express an antigen-specific T cell receptor (TCR) that comprises the antigen-specific TCR polypeptide encoded by the at least one transduced polynucleotide that encodes said TCR polypeptide and is capable of antigen-specifically induced immunosuppression in response to HLA-restricted stimulation by an antigen that is specifically recognized by the TCR polypeptide. Determination of the presence of immunosuppression may be accomplished by any of a wide variety of criteria with which those skilled in the art will be familiar. See, e.g., Sakaguchi et al., 2020 Ann. Rev. Immunol. 38:541 which is expressly incorporated by reference in its entirety.

[0514] For example, by way of illustration and not limitation, multiple mechanisms contributing to suppressive phenotype of Treg cells have been described, such as CTLA-4 immune checkpoint, expression of immunosuppressive cytokines such as IL-10 and TGF-β, cytotoxicity of target cells through the perforin/granzyme pathway, induction of indoleamine 2,3-dioxygenase (IDO) and the catabolism of tryptophan in target cells, as well as consumption of adenosine by expression of CD73, and competition with effector T (Teff) cells for IL-2 since Treg cells constitutively express CD25 (the a subunit of the high affinity receptor for IL-2). See, e.g., Verbsky, J. W., and Chatila, T. A. (2014). Chapter 23—Immune Dysregulation Leading to Chronic Autoimmunity. In Stiehm's Immune Deficiencies, K. E. Sullivan, and E. R. Stiehm, eds., (Amsterdam: Academic Press), pp. 497-516; Campbell et al. 2020 Cell Metab. 31(1):18-25; Dominguez-Villar et al., 2018 Nat. Immunol. 19:665-673; Sakaguchi et al., 2008 Cell 133(5):775-787.

[0515] In some embodiments, antigen-specifically induced immunosuppression thus may comprise one or more of: (i) inhibition of either or both of activation and proliferation of effector T cells that recognize the antigen that is specifically recognized by the airT TCR comprising the TCR polypeptide that is encoded by the at least one transduced polynucleotide, (ii) inhibition of expression of inflammatory cytokines or inflammatory mediators by effector T cells that recognize the antigen that is specifically recognized by the airT TCR comprising the TCR polypeptide that is encoded by the at least one transduced polynucleotide (iii) elaboration of one or more immunosuppressive cytokines or anti-inflammatory products, for example, elaboration of one or more inhibitory mechanisms including release of immunosuppressive cytokines or perforin/granzyme, induction of indoleamine 2,3-dioxygenase (IDO), competition for IL2 or adenosine, catabolism of tryptophan, and/or expression of inhibitory receptors by the airT cell, by the airT cell, or (iv) inhibition of either or both of activation and proliferation of effector T cells that do not recognize the antigen that is specifically recognized by the airT TCR comprising the TCR polypeptide that is encoded by the at least one transduced polynucleotide.

[0516] In certain instances, adoptive transfer airT cell immunotherapy doses (and optionally, at least one other therapeutic agent dose) may be provided between 1 day and 14 days over a 30 day period. In certain instances, doses (and optionally, at least one other therapeutic agent dose) may be provided 1, 2, 3, 4, 5, 6, 7, 8, 9, 10, 11, 12, 13, or 14 days over a 60 day period. Alternate protocols may be appropriate for individual subjects. A suitable dose is an amount of a compound that, when administered as described above, is capable of detectably altering or ameliorating symptoms, or decreases at least one indicator of autoimmune, allergic or other inflammatory immune activity in a statistically significant manner by at least 10-50% relative to the basal (e.g., untreated) level, which can be monitored by measuring specific levels of blood components, for example, detectable levels of circulating immunocytes and/or other inflammatory cells and/or soluble inflammatory mediators including proinflammatory cytokines.

[0517] In some embodiments, rapamycin or a rapalog is administered to the subject before the administration of airT cells, in conjunction with airT cells, and/or following the administration of airT cells. Administration of rapamycin or a rapalog that is capable of inducing dimerization of the CISC components on the surface of an airT cell results in continued IL-2 signal transduction in vivo, promoting survival and proliferation of the CISC-expressing cell without the undesired effects that would be caused by IL-2 administration, such as activation of other T cells. In some embodiments, the rapamycin or rapalog that is administered is everolimus, CCI-779, C20-methallylrapamycin, C16-(S)-3-methylindolerapamycin, C16-iRap, C16-(S)-7-methylindolerapamycin, AP21967, C16-(S)Butylsulfonamidorapamycin, AP23050, sodium mycophenolic acid, benidipine hydrochloride, AP1903, and AP23573, or a metabolite or derivative thereof. In some embodiments, the rapamycin or rapalog is administered at a dose of 0.001 mg/kg to 10 mg/kg body mass of the subject, or a dose between 0.001 mg/kg and 10 mg/kg. In some embodiments, the rapamycin or rapalog is administered at a dose of 0.001 mg/kg to 0.01 mg/kg, 0.01 mg/kg to 0.1 mg/kg, 0.1 mg/kg to 1 mg/kg, or 1 mg/kg to 10 mg/kg. In some embodiments, the rapamycin or rapalog is administered in a separate composition from the airT cells. In some embodiments, the rapamycin or rapalog is administered in multiple doses. In some embodiments, the rapamycin or rapalog is administered for 1, 2, 3, 4, 5, 6, 7, 8, 9, 10, 11, 12, 13, or 14 or more days. In some embodiments, the rapamycin or rapalog is administered for 1, 2, 3, 4, 5, 6, 7, 8, 9, 10, 11, 12, 13, 14, 15, 16, 17, 18, 19, or 20 or more weeks. In some embodiments, the subject is a human. In some embodiments, the administration of the rapamycin or rapalog results in prolonged survival of the administered cells, relative to a subject that is not administered rapamycin or a rapalog. In some embodiments, the administration of the rapamycin or rapalog increases the frequency of airT cells circulating in the peripheral blood of a subject, relative to a subject that is not administered rapamycin or a rapalog.

[0518] In general, an appropriate dosage and treatment regimen provides the airT cells in an amount sufficient to provide therapeutic and/or prophylactic benefit. Such a response can be monitored by establishing an improved clinical outcome (e.g., more frequent remissions, complete or partial, or longer disease-free survival) in treated subjects as compared to non-treated subjects. Decreases (e.g., reductions having statistical significance when compared to a relevant control) in preexisting immune responses to an antigen associated with an autoimmune, allergic, or other inflammatory condition as provided herein generally correlate with an improved clinical outcome. Such immune responses may generally be evaluated using standard leukocyte and/or lymphocyte cell surface marker or cytokine expression, proliferation, cytotoxicity or released cytokine assays, which are routine in the art and may be performed using samples obtained from a subject before and after therapy.

[0519] For example, an amount of airT cells that is administered is sufficient to result in clinically relevant reduction (e.g., a decrease that is clinically remarkable, preferably as may be detectable in a statistically significant manner relative to an appropriate control condition) in symptoms of autoimmune diseases, including but not limited to type 1 diabetes, rheumatoid arthritis (RA), systemic lupus erythematosus (SLE), multiple sclerosis, inflammatory bowel disease (IBD), psoriatic arthritis, Crohn's disease, ulcerative colitis, seronegative spondyloarthropathies, Behcet's disease, vasculitis, or other autoimmune diseases.

[0520] Accordingly, in some embodiments a reduction in one or more relevant clinical criteria as known in the art for assessing type 1 diabetes (T1D) may be identified following adoptive transfer, to a T1D patient, of airT cells expressing a TCR that specifically recognizes an epitope of an antigen having relevance to a T1D-associated autoantigen. Exemplary T1D-associated antigens and TCR structures that specifically recognize such antigens, which are typically autoantigens, are described herein.

[0521] Common defining criteria for stage two T1D may include detection of two or more pancreatic islet-specific autoantibodies in the patient and evidence of dysglycemia during an oral glucose-tolerance test. Dysglycemia may in some embodiments be defined as a fasting glucose level of 110 to 125 mg per deciliter (6.1 to 6.9 mmol per liter), a two-hour postprandial plasma glucose level of at least 140 mg per deciliter (7.8 mmol per liter) and less than 200 mg per deciliter (11.1 mmol per liter), or an intervening postprandial glucose level at 30, 60, or 90 minutes of greater than 200 mg per deciliter. In some embodiments clinical T1D may be defined as the presence of symptoms of diabetes (e.g., increased thirst, increased urination, and/or unexplained weight loss, compared to normal subjects known to be free of any risk for having or presence of T1D) and a blood sugar level equal to or greater than 200 milligrams per deciliter (mg/dL), a fasting blood sugar level that is equal to or greater than 126 mg/dL, or a two-hour oral glucose tolerance test (OGTT) result that is equal to or greater than 200 mg/dL or a hemoglobin A1c level that is 6.5% or higher (e.g., Khokhar et al., 2017 Clin. Diabetes 35(3):133.)

[0522] Reduction in RA symptoms may be evidenced, for example by way of illustration and not limitation, as reduction of any one or more of fatigue, loss of appetite, low fever, swollen glands, weakness, swollen joints, joint pain, morning stiffness, warm, tender, or stiff joints when not used for as little as an hour, bilateral joint pain (fingers (but not the fingertips), wrists, elbows, shoulders, hips, knees, ankles, toes, jaw, and neck may be affected); loss of range of motion of affected joints, pleurisy, eye burning, eye itching, eye discharge, nodules under the skin, numbness, tingling, or burning in the hands and feet. Criteria for diagnosis and clinical monitoring of RA patients are well known to those skilled in the relevant art. See, e.g., Hochberg et al., Rheumatology, 2010 Mosby; Firestein et al., Textbook of Rheumatology, 2008 Saunders. Criteria for diagnosis and clinical monitoring of patients having RA and/or other autoimmune diseases are also well known to those skilled in the relevant art. See, e.g., Petrov, Autoimmune Disorders: Symptoms, Diagnosis and Treatment, 2011 Nova Biomedical Books; Mackay et al. (Eds.), The Autoimmune Diseases-Fourth Edition, 2006 Academic Press; Brenner (Ed.), Autoimmune Diseases: Symptoms, Diagnosis and Treatment, 2011 Nova Science Pub. Inc.

[0523] Standard techniques may be used for recombinant DNA, peptide and oligonucleotide synthesis, immunoassays and tissue culture and transformation (e.g., electroporation, or lipofection). Enzymatic reactions and purification techniques may be performed according to manufacturer's specifications or as commonly accomplished in the art or as described herein. These and related techniques and procedures may be generally performed according to conventional methods well known in the art and as described in various general and more specific references in microbiology, molecular biology, biochemistry, molecular genetics, cell biology, virology and immunology techniques that are cited and discussed throughout the present specification. See, e.g., Sambrook, et al., Molecular Cloning: A Laboratory Manual, 3d ed., Cold Spring Harbor Laboratory Press, Cold Spring Harbor, N.Y.; Current Protocols in Molecular Biology (John Wiley and Sons, updated July 2008); Short Protocols in Molecular Biology: A Compendium of Methods from Current Protocols in Molecular Biology, Greene Pub. Associates and Wiley-Interscience; Glover, DNA Cloning: A Practical Approach, vol. I & II (TRL Press, Oxford Univ. Press USA, 1985); Current Protocols in Immunology (Edited by: John E. Coligan, Ada M. Kruisbeek, David H. Margulies, Ethan M. Shevach, Warren Strober 2001 John Wiley & Sons, NY, NY); Real-Time PCR: Current Technology and Applications, Edited by Julie Logan, Kirstin Edwards and Nick Saunders, 2009, Caister Academic Press, Norfolk, UK; Anand, Techniques for the Analysis of Complex Genomes, (Academic Press, New York, 1992); Guthrie and Fink, Guide to Yeast Genetics and Molecular Biology (Academic Press, New York, 1991); Oligonucleotide Synthesis (N. Gait, Ed., 1984); Nucleic Acid Hybridization (B. Hames & S. Higgins, Eds., 1985); Transcription and Translation (B. Hames & S. Higgins, Eds., 1984); Animal Cell Culture (R. Freshney, Ed., 1986); Perbal, A Practical Guide to Molecular Cloning (1984); Next-Generation Genome Sequencing (Janitz, 2008 Wiley-VCH); PCR Protocols (Methods in Molecular Biology) (Park, Ed., 3rd Edition, 2010 Humana Press); Immobilized Cells And Enzymes (IRL Press, 1986); the treatise, Methods In Enzymology (Academic Press, Inc., N.Y.); Gene Transfer Vectors For Mammalian Cells (J. H. Miller and M. P. Calos eds., 1987, Cold Spring Harbor Laboratory); Harlow and Lane, Antibodies, (Cold Spring Harbor Laboratory Press, Cold Spring Harbor, N.Y., 1998); Immunochemical Methods In Cell And Molecular Biology (Mayer and Walker, eds., Academic Press, London, 1987); Handbook Of Experimental Immunology, Volumes I-IV (D. M. Weir and C C Blackwell, eds., 1986); Roitt, Essential Immunology, 6th Edition, (Blackwell Scientific Publications, Oxford, 1988); Embryonic Stem Cells: Methods and Protocols (Methods in Molecular Biology) (Kurstad Turksen, Ed., 2002); Embryonic Stem Cell Protocols: Volume I: Isolation and Characterization (Methods in Molecular Biology) (Kurstad Turksen, Ed., 2006); Embryonic Stem Cell Protocols: Volume II: Differentiation Models (Methods in Molecular Biology) (Kurstad Turksen, Ed., 2006); Human Embryonic Stem Cell Protocols (Methods in Molecular Biology) (Kursad Turksen Ed., 2006); Mesenchymal Stem Cells: Methods and Protocols (Methods in Molecular Biology) (Darwin J. Prockop, Donald G. Phinney, and Bruce A. Bunnell Eds., 2008); Hematopoietic Stem Cell Protocols (Methods in Molecular Medicine) (Christopher A. Klug, and Craig T. Jordan Eds., 2001); Hematopoietic Stem Cell Protocols (Methods in Molecular Biology) (Kevin D. Bunting Ed., 2008) Neural Stem Cells: Methods and Protocols (Methods in Molecular Biology) (Leslie P. Weiner Ed., 2008).

### Certain Gene Editing Embodiments

[0524] Any one of a number of gene- or genome- editing methods can used to accomplish editing of the TRAC locus and/or FOXP3 gene/locus. Non-limiting gene editing methods include zinc finger nuclease (ZFN)-mediated gene editing, transcription activator-like effector nuclease (TALEN)-mediated gene editing, meganuclease-mediated gene editing, transposon-mediated gene editing, serine integrase-mediated gene editing, lentivirus-mediated gene editing, RNA-guided nuclease (RGN)-mediated gene editing, CRISPR/Cas-mediated gene editing, homologous recombination-mediated gene editing, and combinations thereof. Some embodiments of the methods and compositions provided herein include systems for gene editing. Some embodiments include approaches using viral approaches, e.g., using lentivirus or AAV, or non-virus approaches, e.g., transposon-based methods. Transposon-based systems are described in Woodard L. E. et al. (2012) PLoS ONE 7(11): e42666; and Amberger M. et al., (2020) BioEssays 42: 20000136, which are each incorporated by reference in its entirety.

[0525] Gene-editing systems as described herein can make use of viral or non-viral vectors or cassettes, as well as nucleases that allow site-specific or locus-specific gene-editing, such as RNA-guided nucleases, CRISPR/Cas nucleases (e.g., Cpf1 or Cas9 nucleases), meganucleases, TALENs, or ZFNs., as described in paragraph [0039]. Certain RNA-guided nucleases useful with some embodiments provided herein are disclosed in U.S. Pat. No. 11,162,114, which is expressly incorporated by reference herein in its entirety. Non-limiting examples of CRISPR/Cas nucleases include SpCas9, SaCas9, CjCas9, xCas9, C2c1, Casl3a/C2c2, C2c3, Casl3b, Cpf1, and variants thereof. Certain features useful with some embodiments provided herein are disclosed in WO 2019/210057, which is expressly incorporated by reference in its entirety.

[0526] This application is based, at least in part, on the unexpected finding that split CISC function is dependent upon expression of the different components of the CISC system and/or location of these elements within a construct/cassette/polynucleotide (e.g., an HDR cassette). Accordingly, in some embodiments, one or more constructs for a gene-editing system as described herein comprises a promoter (e.g., an MND promoter) that results in a high expression of CISC component compared to promoters (e.g., EF1-alpha) that results in a lower expression of CISC components. In some embodiments, the promoter is selected from an MND, EF-1alpha, PJET, UBC, or CMV promoter. In some embodiments, the promoter is an MND promoter. In some embodiments, a first polynucleotide comprising a nucleic acid encoding a first CISC component is inserted into a first locus of a cell, and a second nucleic acid encoding a second CISC component is inserted into a second locus of cell that is different from the first locus. In some embodiments, one or both of the polynucleotides comprising nucleic acids encoding a first or second CISC component also comprises a nucleic acid encoding a third CISC component that is soluble and does not comprise an extracellular or transmembrane domain, and is capable of specifically binding to the CISC inducer molecule. In some embodiments, a first polynucleotide comprises an MND promoter that is operably linked to the nucleic acid that encodes the first CISC component. In some embodiments, a second polynucleotide comprises an MND promoter that is operably linked to the nucleic acid encoding the second CISC component. In some embodiments, the first CISC component comprises an FKBP extracellular domain, a transmembrane domain, and an IL2RB intracellular signaling domain, the second CISC component comprises an FRB extracellular domain, a transmembrane domain, and an IL2RG intracellular signaling domain, and the third CISC component comprises a soluble FRB domain. In some embodiments, the first CISC component comprises an FKBP extracellular domain, a transmembrane domain, and an IL2RG intracellular signaling domain, the second CISC component comprises an FRB extracellular domain, a transmembrane domain, and an IL2RB intracellular signaling domain, and the third CISC component comprises a soluble FRB domain. In some embodiments, the first polynucleotide comprising a nucleic acid encoding the first CISC component further comprises a nucleic acid encoding a TCR polypeptide or a portion thereof. In some embodiments, the first polynucleotide comprising a nucleic acid encoding the first CISC component further comprises a nucleic acid encoding a CAR polypeptide. In some embodiments, the first polynucleotide comprising a nucleic acid encoding the first CISC component comprises an MND promoter that, after insertion into the genome of a cell, becomes operably linked to an endogenous FOXP3 gene or a portion thereof, such that the MND promoter controls transcription of the endogenous FOXP3 gene. In some embodiments, the second polynucleotide comprising a nucleic acid encoding the second CISC component further comprises a nucleic acid encoding a TCR polypeptide or a portion thereof. In some embodiments, the second polynucleotide comprising a nucleic acid encoding the second CISC component further comprises a nucleic acid encoding a CAR polypeptide. In some embodiments, the second polynucleotide comprising a nucleic acid encoding the second CISC component comprises an MND promoter that, after insertion into the genome of a cell, becomes operably linked to an endogenous FOXP3 gene or a portion thereof, such that the MND promoter controls transcription of the endogenous FOXP3 gene. In some embodiments, provided herein is a method comprising contacting a cell with (i) a first polynucleotide comprising an MND promoter operably linked to a nucleic acid encoding (a) a first CISC component comprising an FRB extracellular domain, a transmembrane domain, and an IL2RB intracellular signaling domain, and (b) a nucleic acid encoding a third CISC component comprising a soluble FRB domain, wherein the MND promoter is inserted upstream of the first coding exon of the endogenous FOXP3 gene, and downstream of (e.g., 10 to 10,000 bp downstream from) a TSDR in the endogenous FOXP3 locus of the cell; and (ii) a second nucleic acid comprising an MND promoter operably linked to a nucleic acid encoding (a) a second CISC component comprising an FKBP extracellular domain, a transmembrane domain, and an IL2RG intracellular domain, (b) a nucleic acid encoding an exogenous TCRβ, and (c) a nucleic acid encoding an exogenous TRAV and TRAJ amino acid sequences, wherein the second nucleic acid is inserted into the TRAC locus upstream from nucleic acid encoding the TCRα constant region amino acid sequence, wherein the inserted MND promoter controls transcription of the exogenous TCRβ and a TCRα comprising the exogenous TRAV and TRAJ amino acid sequences and the endogenous TCRα amino acid sequences. In some embodiments, the method further comprises delivering to the cell a guide RNA targeting the TRAC locus, a guide RNA targeting the FOXP3 locus, and an RNA-guided nuclease or a nucleic acid encoding the RNA-guided endonuclease. In some embodiments, the method comprises delivering to the cell a first nuclease that cleaves a nucleotide sequence within the FOXP3 locus or a nucleic acid encoding the first nuclease, and a second nuclease that cleaves a nucleotide sequence within the TRAC locus or a nucleic acid encoding the second nuclease. It should be understood that any order of nucleic acids on a polynucleotide are contemplated herein. For example, a polynucleotide may have a nucleic acid encoding a TCR or portion thereof that is in close proximity to the promoter relative to the proximity of nucleic acid encoding a CISC component to the promoter. On the other hand, a nucleic acid encoding a CISC component could be in closer proximity to a promoter relative to a nucleic acid encoding a TCR or portion thereof.

[0527] In some embodiments, provided herein is a genetically modified cell comprising in its genome (i) a first polynucleotide comprising an MND promoter operably linked to a nucleic acid encoding (a) a first CISC component comprising an FRB extracellular domain, a transmembrane domain, and an IL2RB intracellular signaling domain, and (b) a third CISC component comprising a soluble FRB domain, wherein the MND promoter is inserted upstream of the first coding exon of the endogenous FOXP3 gene, and downstream of (e.g., 10 to 10,000 bp downstream from) a TSDR in the endogenous FOXP3 locus of the cell; and (ii) a second polynucleotide comprising an MND promoter operably linked to a nucleic acid encoding (a) a second CISC component comprising an FKBP extracellular domain, a transmembrane domain, and an IL2RG intracellular domain, (b) an exogenous TCRβ, and (c) an exogenous TRAV and TRAJ amino acid sequences, wherein the second nucleic acid is inserted into the TRAC locus upstream from nucleic acid encoding the TCRα constant region amino acid sequence, wherein the inserted MND promoter is controls transcription of the exogenous TCRβ and a TCRα comprising the exogenous TRAV and TRAJ amino acid sequences and the endogenous TCRα amino acid sequences.

[0528] In some embodiments, provided herein is a method of treating an autoimmune, allergic, and/or inflammatory disease in a subject, comprising providing to the subject a genetically modified cell comprising in its genome (i) a first polynucleotide comprising an MND promoter operably linked to a nucleic acid encoding (a) a first CISC component comprising an FRB extracellular domain, a transmembrane domain, and an IL2RB intracellular signaling domain, and (b) a third CISC component comprising a soluble FRB domain, wherein the MND promoter is inserted upstream of the first coding exon of the endogenous FOXP3 gene, and downstream of (e.g., 10 to 10,000 bp downstream from) a TSDR in the endogenous FOXP3 locus of the cell; and (ii) a second polynucleotide comprising an MND promoter operably linked to a nucleic acid encoding (a) a second CISC component comprising an FKBP extracellular domain, a transmembrane domain, and an IL2RG intracellular domain, (b) an exogenous TCRβ, and (c) an exogenous TRAV and TRAJ amino acid sequences, wherein the second polynucleotide is inserted into the TRAC locus upstream from nucleic acid encoding the TCRα constant region amino acid sequence, wherein the inserted MND promoter is controls transcription of the exogenous TCRβ and a TCRα comprising the exogenous TRAV and TRAJ amino acid sequences and the endogenous TCRα amino acid sequences.

### Method of Optimizing Level CISC Component Expression

[0529] Contemplated herein is a method of optimizing the expression of CISC components. In some embodiments, expression of CISC components is optimized by orienting nucleic acid(s) encoding them to be proximal to a promoter. In some embodiments, expression of CISC components is optimized by the choice of promoter used for encoding the CISC components. In some embodiments, expression of CISC components is optimized by using the same promoter to promote transcription of each CISC component. In some embodiments, each CISC component is expressed under the control of a constitutive promoter. In some embodiments, each CISC component is expressed under the control of a PGK, EF-1a, or MND promoter. In some embodiments, each CISC component is expressed under the control of an MND promoter. Some embodiments of the methods provided herein comprise (i) inserting a first donor template comprising an MND promoter operably linked to a nucleotide sequence encoding a first CSC component into a first locus; and (ii) inserting a second donor template comprising an MND promoter operably linked to a nucleotide sequence encoding a second CISC component into a second locus, wherein the MND promoter of the first and/or second donor template is operably linked to a nucleotide sequence encoding a third CISC component that is capable of binding to the CISC inducer molecule. In some embodiments, the first and second CISC components are expressed at a consistent level. In some embodiments, the first and second CISC components are expressed such that the abundance of the first CISC component is between 50% to 150%, 60% to 140%, 70% to 130%, 80% to 120%, 90% to 110%, or 95% to 105% of the abundance of the second CISC component. In some embodiments, the relative abundance of each CISC component is measured by comparing the number of RNA transcripts encoding each CISC component. In some embodiments, the relative abundance of each CISC component is measured by comparing the number of protein molecules of each CISC component.

[0530] Some embodiments include a gene editing chemical-inducible signaling complex (CISC) system comprising a first polynucleotide comprising a first promoter and a nucleic acid encoding a first CISC component comprising a first extracellular binding domain, a transmembrane domain, and a first signaling domain, wherein the first promoter is proximal to the nucleic acid encoding a first CISC component. Some embodiments also include a second polynucleotide comprising a second promoter and a nucleic acid encoding a second CISC component comprising a second extracellular binding domain, a transmembrane domain, and a second signaling domain. In some embodiments, the first CISC component and the second CISC component are configured such that when expressed in a cell, they are capable of dimerizing in the presence of a dimerizing agent, such as rapamycin or a rapalog to generate a signaling-competent CISC.

[0531] In some embodiments, a promoter is proximal to a nucleic acid encoding a CISC component if it is within a certain distance (e.g., within 500, 400, 300, 200, 100, 50, 10, 5 consecutive nucleotides) from the 3′ end of the promoter. In some embodiments, a promoter is proximal to a nucleic acid encoding a CISC component if there are no other elements (e.g., an antigen-specific moiety) between the promoter and the CISC component.

[0532] In some embodiments, a 3′ end of the first promoter is located from a 5′ end of the nucleic acid encoding a first CISC component within 500, 400, 300, 200, 100, 50, 10, 5 consecutive nucleotides, or within a range defined by any two of the foregoing numbers of consecutive nucleotides.

[0533] In some embodiments, the first polynucleotide is configured for integration into a first target locus of a genome, and the second polynucleotide is configured for integration into a second target locus of the genome. For example, a first polynucleotide can include sequences homologous to a first target locus, and/or a second polynucleotide can include sequences homologous to a second target locus. In some embodiments, the first target locus is different from the second target locus. In some embodiments, the first target locus is located on a chromosome different from the second target locus. In some embodiments, the first target locus is selected from a TRAC locus or a FOXP3 locus; and the second target locus is selected from a TRAC locus or a FOXP3 locus. In some such embodiments, the first target locus is different from the second target locus. In some embodiments, the first locus is any locus in the genome of a cell, and the second locus is any locus in the genome of the cell that does not overlap with the first locus. In some embodiments, the first and second locus are the same or overlap. In some embodiments, a locus comprises a nucleic acid sequence encoding a gene. In some embodiments, a locus comprises a nucleic acid comprising one or more exons encoding a gene, and one or more nucleotides between the one or more exons. In some embodiments, a locus comprises a nucleic acid comprising a one or more regulatory elements and a nucleic acid sequence encoding a gene. In some embodiments, a single gene in a genome comprises multiple loci. In some embodiments, multiple loci comprise multiple nucleic acid sequences that do not share common nucleotides. In some embodiments, multiple loci comprise multiple nucleic acid sequences, and no nucleotide belongs to more than one locus. In some embodiments, the first polynucleotide encodes a first CISC component, and the second polynucleotide encodes a second CISC component.

[0534] In some embodiments, the first extracellular binding domain comprises an FK506 binding protein (FKBP)-rapamycin binding (FRB) domain; and the second extracellular binding domain comprises an FKBP domain. In some embodiments, the first signaling domain comprises an IL-2 receptor subunit beta (IL2Rβ) domain or functional derivative thereof; and the second signaling domain comprises an IL-2 receptor subunit gamma (IL2Rβγ) domain or functional derivative thereof. In some embodiments, the IL2Rβ domain comprises a truncated IL2Rβ domain.

[0535] In some embodiments, the first and/or second promoter comprises a constitutive promoter. In some embodiments, the first and/or second promoter comprises a MND promoter.

[0536] In some embodiments, the system comprises a first vector comprising the first polynucleotide, and a second vector comprises the second polynucleotide. In some embodiments, the first vector and/or the second vector comprises a viral vector. In some embodiments, the first vector and/or the second vector comprises a lentiviral, an adenoviral, or an adeno-associated viral (AAV) vector.

[0537] In some embodiments, the first polynucleotide and/or the second polynucleotide comprises a nucleic acid encoding a naked FRB domain, wherein the nucleic acid encoding a naked FRB domain lacks a nucleic acid encoding an endoplasmic reticulum localization signal polypeptide.

[0538] In some embodiments, the first polynucleotide and/or the second polynucleotide comprises a nucleic acid encoding a payload. In some embodiments, the first polynucleotide and/or the second polynucleotide comprises a nucleic acid encoding a self-cleaving polypeptide, wherein the nucleic acid encoding a self-cleaving polypeptide is 5′ of the nucleic acid encoding a payload. In some embodiments, the self-cleaving polypeptide is selected from the group consisting of P2A, T2A, E2A, and F2A. In some embodiments, the payload comprises a T cell receptor (TCR), chimeric antigen receptor (CAR), or functional fragment thereof. In some embodiments, the TCR comprises the polypeptide sequence of any one of SEQ ID NOs 1377-1390.

[0539] In some embodiments, the first polynucleotide and/or the second polynucleotide is configured for integration into a target genomic locus by a recombination technique, such as homology directed repair (HDR) or by non-homologous end joining (NHEJ). Some embodiments also include a guide RNA (gRNA) and a DNA endonuclease. In some embodiments, the DNA endonuclease comprises a Cas9 endonuclease.

[0540] In some embodiments, the first nucleic acid of the FOXP3 knock-in construct is a FKBP-IL2RG, and the second nucleic acid is an FRB, wherein a dual editing strategy is used, and further wherein the FKBP-IL2RG component of the Split-CISC (AAV donor #3324) is association with a second AAV HDR donor targeting the TRAC locus and designed to express the T1D4 islet TCR in combination of the FRB-IL2RB component of the Split-CISC (FIG. 146, panel A).

[0541] In some embodiments, a polynucleotide is configured for integration into the TRAC locus to express an exogenous TCR or CAR and a CISC component under the control of an endogenous promoter (see e.g., FIGS. 54, 68, and 70). In some embodiments, the polynucleotide is integrated into the TRAC locus, wherein a nucleic acid sequence encoding TCRβ, a nucleic acid sequence encoding TCRα, and a nucleic acid sequence encoding a CISC component, optionally FRB-IL2Rβ, are inserted downstream of (e.g., 10 to 10,000 bp downstream from) an endogenous promoter. In some embodiments, the endogenous promoter is operably linked to an open reading frame encoding a polypeptide comprising 1) a TCRβ, 2) a TCRα, and 3) a CISC component, optionally a FRB-IL2Rβ polypeptide, wherein each of the three polypeptides are separated by a P2A self-cleavage motif. In some embodiments, the TCRα polypeptide and TCRβ polypeptides form a T1D4 islet-specific TCR.

[0542] In some embodiments, a polynucleotide is configured for integration into the TRAC locus to express an exogenous TCR and a CISC component under the control of an exogenous promoter (see e.g., FIG. 67). In some embodiments, the polynucleotide is integrated into the TRAC locus, wherein the polynucleotide comprises an exogenous promoter that is operably linked to 1) a nucleic acid sequence encoding TCRβ, 2) a nucleic acid sequence encoding TCRα, and 3) a nucleic acid sequence encoding a CISC component, optionally FRB-IL2Rβ. In some embodiments, the exogenous promoter is operably linked to an open reading frame encoding a polypeptide comprising 1) a TCRβ polypeptide, 2) a TCRα polypeptide, and 3) a CISC component, optionally a FRB-IL2Rβ polypeptide, wherein each of the three polypeptides are separated by a P2A self-cleavage motif. In some embodiments, the TCRα polypeptide and TCRβ polypeptides form a T1D4 islet-specific TCR. In some embodiments, the exogenous promoter is an MND promoter.

[0543] In some embodiments a polynucleotide is configured for integration into the TRAC locus to hijack the endogenous TRAC gene and express at least a portion of the endogenous TRAC gene under the control of an exogenous promoter (see e.g., FIG. 164). In some embodiments, the polynucleotide comprises an exogenous promoter that is operably linked to 1) a nucleic acid sequence encoding a CISC component, optionally FKBP-IL2Ry, 2) a nucleic acid sequence encoding a TCRβ polypeptide, and 3) a nucleic acid sequence encoding a portion of a TCRα polypeptide, such as a portion comprising one or more complementarity determining regions (CDRs) and/or framework regions that affect the specificity of the TCRα protein. In some embodiments the polynucleotide is inserted into the TRAC locus such that the nucleic acid sequence encoding the portion of a TCRα polypeptide is inserted in-frame with a portion of the endogenous TCRα coding sequence, and after integration the TRAC locus comprises a nucleic acid sequence encoding a full-length TCRα polypeptide. In some embodiments, integration of the polynucleotide results in the TRAC locus containing an exogenous promoter that is operably linked to a nucleic acid sequence encoding a polypeptide encoding 1) a CISC component, optionally FKBP-IL2Ry, 2) a TCRβ polypeptide, and 3) a TCRα polypeptide, wherein each of the three polypeptides are separated by a P2A self-cleavage motif. In some embodiments, the TCRα and TCRβ polypeptides form a T1D4 islet-specific TCR. In some embodiments, the exogenous promoter is an MND promoter.

[0544] In some embodiments, the first polypeptide of the TRAC-targeting HDR construct is a T1D4, and the second polypeptide is an FRB-IL2B (AA237-551; AAV #3243) (FIG. 146, panel B). In some embodiments, the first polypeptide of the TRAC-targeting HDR construct is T1D4, and the second polypeptide is an FRB-IL2Bmin polypeptide, which comprises a truncated intracellular IL-2 receptor beta signaling domain that retains key tyrosine residues (AA233-350; AAV donor #3333), referred to here as Split-μCISC (FIG. 146, panel C). Importantly, in these configurations, the FRB-IL2RB CISC component within the TRAC targeting construct lies downstream of two P2A elements from the MND promoter, potentially impacting its expression level.

[0545] In some embodiments, a micro-CISC component of the TRAC-targeting HDR construct is proximal to an MND promoter (FIG. 149, upper). In some embodiments, a TCR (T1D4) component of the TRAC-targeting HDR construct is proximal to an MND promoter (FIG. 149, lower). By design, this approach re-orients the μCISC from previous constructs such that it is the first peptide expressed after the MND promoter. These embodiments serve as alternative strategy to introduce defined TCRs at the TRAC locus, wherein a TRAC hijack strategy is employed that knocks in the TCR-alpha variable regions in-frame to the endogenous TRAC gene, thereby reducing the total size of the repair template.

[0546] In some embodiments, the first polypeptide of the full CISC TRAC hijack construct (3354) is an FRB-IL2RB AA237-551, the second polypeptide is a full-length TCRb, and the third polypeptide is a TRAV/TRAJ (FIG. 164, panel A). In some embodiments, the first polypeptide of the full CISC component swap TRAC hijack construct (3363) is a an FKBP-IL2RG, the second polypeptide is a full-length TCRb, and the third polypeptide is a TRAV/TRAJ (FIG. 164, panel B). In some embodiments, the first polypeptide of the CISC component swap FOXP3 construct (3362) is an FRB-IL2RB AA237-551, and the second polypeptide is an FRB (FIG. 164, panel C). In some embodiments, the first polypeptide of the T1D4 full CDS CISC order swap construct (3364) comprising is an FKBP-IL2RG polypeptide, and the second polypeptide is a T1D4 (FIG. 165, panel A). In some embodiments, the first polypeptide of the A2-CAR CISC construct is an FRB-IL2RB AA237-551, and the second polypeptide is an A2-CAR (FIG. 165, panel B). The constructs disclosed herein are designed to optimize CISC component expression and tested for the generation of dual-edited antigen-specific, CISC expressing engTregs. As disclosed herein, the constructs are also evaluated for CISC functionality and antigen-specific engTreg function.

[0547] In some embodiments, the rapalog is selected from the group consisting of everolimus, CCI-779, C20-methallylrapamycin, C16-(S)-3-methylindolerapamycin, C16-iRap, C16-(S)-7-methylindolerapamycin, AP21967, C16-(S)Butylsulfonamidorapamycin, AP23050, sodium mycophenolic acid, benidipine hydrochloride, AP1903, and AP23573, and a metabolite or derivative thereof.

[0548] Some embodiments include a cell comprising any one of the foregoing systems. In some embodiments, the cell is a T cell, a precursor T cell, or a hematopoietic stem cell. In some embodiments, the cell is an NK-T cell (e.g., a FOXP3− NK-T cell or a FOXP3+ NK-T cell). In some embodiments, the cell is a regulatory B (Breg) cell (e.g., a FOXP3− B cell or a FOXP3+ B cell). In some embodiments, the cell is a CD4+ T cell (e.g., a FOXP3−CD4+ T cell or a FOXP3+CD4+ T cell) or a CD8+ T cell (e.g., a FOXP3−CD8+ T cell or a FOXP3+CD8+ T cell). In some embodiments, the cell is a CD25− T cell. In some embodiments, the cell is a regulatory T (Treg) cell. In some embodiments, a cell as provided herein is an engineered cell. In some embodiments, an engineered cell is a cell in which one or more genes/loci are manipulated or edited (e.g., to stabilize expression of one or more genes). In some embodiments, an engineered cell comprises editing of the Foxp3 gene/locus, e.g., by inserting a promoter (in some embodiments, downstream of (e.g., 10 to 10,000 bp downstream from) one or more regulatory elements like the TSDR, and/or upstream from the first coding exon). In some embodiments, the cell is a T regulatory type 1 (Tr1) cell. In some embodiments, the Treg cell is a FOXP3+ Treg cell. In some embodiments, the Treg cell expresses CTLA-4, LAG-3, CD25, CD39, neuropilin-1, galectin-1, and/or IL-2Ra on its surface. In some embodiments, a cell as provided herein is an engineered cell. In some embodiments, an engineered cell is a cell in which one or more genes/loci are manipulated or edited (e.g., to stabilize expression of one or more genes). In some embodiments, an engineered cell comprises editing of the Foxp3 gene/locus, e.g., by inserting a promoter (in some embodiments, downstream of (e.g., 10 to 10,000 bp downstream from) one or more regulatory elements like the TSDR, and/or upstream from the first coding exon). In some embodiments, the cell is ex vivo. In some embodiments, the cell is a human cell. In some embodiments, the cell is obtained from peripheral blood. In some embodiments, the cell is obtained from umbilical cord blood. In some embodiments, the cell is an allogeneic cell. In some embodiments, the cell is an autologous cell. Some embodiments include a FOXP3+ Treg cell comprising one or more nucleic acid sequences encoding a) a first transmembrane receptor polypeptide comprising a first extracellular ligand-binding domain, a transmembrane domain, and an IL-2Rβ intracellular signaling domain; b) a second transmembrane receptor polypeptide comprising a first extracellular ligand-binding domain, a transmembrane domain, and an IL-2Rγ intracellular signaling domain; and c) an intracellular FKBP-rapamycin-binding (FRB) polypeptide. In some embodiments, one of the first or second extracellular ligand-binding domains is an FK506-binding protein (FKBP) domain or a derivative thereof, and the other extracellular ligand-binding domain is an FKBP-rapamycin-binding (FRB) domain or a derivative thereof. In some embodiments, the rapalog is everolimus, CCI-779, C20-methallylrapamycin, C16-(S)-3-methylindolerapamycin, C16-iRap, C16-(S)Butylsulfonamidorapamycin, AP23050, C16-(S)-7-methylindolerapamycin, AP21967, sodium mycophenolic acid, benidipine hydrochloride, AP1903, or AP23573; a metabolite of rapamycin; or an IMID-class drug, optionally thalidomide, pomalidomide, lenalidomide. or an IMID-class drug analogue. In some embodiments, the ligand-binding domains of the first and second transmembrane receptors bind to rapamycin or a rapalog. In some embodiments, the first and second transmembrane receptors dimerize in the presence of the rapamycin or rapalog. In some embodiments, dimerization of the transmembrane receptors causes STAT5 phosphorylation and/or PI3K signal transduction, which promote survival and/or proliferation of the Treg cell. In some embodiments, the cell comprises a promoter inserted at the FOXP3 locus upstream of the first coding exon of FOXP3, which contains the start codon of the open reading frame encoding FOXP3. In some embodiments, the promoter is inserted downstream of (e.g., 10 to 10,000 bp downstream from) the TSDR. In some embodiments, the cell comprises an exogenous nucleic acid sequence encoding FOXP3 that is downstream from the inserted promoter, and the inserted promoter controls transcription of this exogenous FOXP3 coding sequence. In some embodiments, the inserted promoter is active, promoting transcription of mRNA encoding FOXP3, even under pro-inflammatory conditions. In some embodiments, the promoter is a constitutive promoter. In some embodiments, the promoter is an EF1a, PGK, or MND promoter. In some embodiments, the promoter is an MND promoter. In some embodiments, the cell comprises an exogenous nucleic acid sequence encoding a T cell receptor p protein or a portion thereof, a T cell receptor a protein or a portion thereof, or a chimeric antigen receptor or a portion thereof. In some embodiments, the T cell receptor or chimeric antigen that specifically recognizes an antigen associated with the pathogenesis of an autoimmune condition, an allergic condition, or an inflammatory condition. In some embodiments, the T cell receptor or chimeric antigen that specifically recognizes an antigen associated with the pathogenesis of an autoimmune disease (e.g., diabetes such as type-1 diabetes, primary biliary cholangitis), autoinflammatory disease (e.g., ARDS, stroke, and atherosclerotic cardiovascular disease), alloimmune disease (e.g., graft-versus-host disease, sold organ transplant, and immune mediated recurrent pregnancy loss), and/or allergic disease (e.g., asthma, drug hypersensitivity, and celiac disease). In some embodiments, a condition to be treated is a cancer. Wang et al. (J Intern Med. 2015 October;278(4):369-95) provide a review of autoimmune diseases, which review is incorporated herein by reference. In some embodiments (i) the autoimmune condition is selected from type 1 diabetes mellitus, multiple sclerosis, systemic lupus erythematosus, myasthenia gravis, rheumatoid arthritis, early onset rheumatoid arthritis, ankylosing spondylitis, immune-mediated pregnancy loss, immune-mediated recurrent pregnancy loss, dermatomyositis psoriatic arthritis, Crohn's disease, inflammatory bowel disease (IBD), ulcerative colitis, bullous pemphigoid, pemphigus vulgaris, autoimmune hepatitis, psoriasis, Sjogren's syndrome, or celiac disease; (ii) the allergic condition is selected from allergic asthma, steroid-resistant asthma, atopic dermatitis, celiac disease, pollen allergy, food allergy, drug hypersensitivity, or contact dermatitis; and (iii) the inflammatory condition is selected from pancreatic islet cell transplantation, asthma, hepatitis, traumatic brain injury, primary sclerosing cholangitis, primary biliary cholangitis, polymyositis, stroke, Still's disease, acute respiratory distress syndrome, uveitis inflammatory bowel disease (IBD), ulcerative colitis, graft-versus-host disease (GVHD), tolerance induction for transplantation, transplant rejection, or sepsis.

[0549] Some embodiments include a cell comprising one or more nucleic acid sequences encoding a) a first transmembrane receptor polypeptide comprising a first extracellular ligand-binding domain, a transmembrane domain, and an IL-2Rβ intracellular signaling domain; b) a second transmembrane receptor polypeptide comprising a first extracellular ligand-binding domain, a transmembrane domain, and an IL-2Rγ intracellular signaling domain; and c) an intracellular FKBP-rapamycin-binding (FRB) polypeptide. In some embodiments, one of the first or second extracellular ligand-binding domains is an FK506-binding protein (FKBP) domain or a derivative thereof, and the other extracellular ligand-binding domain is an FKBP-rapamycin-binding (FRB) domain or a derivative thereof. In some embodiments, the rapalog is everolimus, CCI-779, C20-methallylrapamycin, C16-(S)-3-methylindolerapamycin, C16-iRap, C16-(S)Butylsulfonamidorapamycin, AP23050, C16-(S)-7-methylindolerapamycin, AP21967, sodium mycophenolic acid, benidipine hydrochloride, AP1903, or AP23573; a metabolite of rapamycin; or an IMID-class drug, optionally thalidomide, pomalidomide, lenalidomide. or an IMID-class drug analogue. In some embodiments, the ligand-binding domains of the first and second transmembrane receptors bind to rapamycin or a rapalog. In some embodiments, the first and second transmembrane receptors dimerize in the presence of the rapamycin or rapalog. In some embodiments, dimerization of the transmembrane receptors causes STAT5 phosphorylation and/or PI3K signal transduction, which promote survival and/or proliferation of the Treg cell. In some embodiments, the cell comprises an exogenous nucleic acid sequence encoding a T cell receptor p protein or a portion thereof, a T cell receptor a protein or a portion thereof, or a chimeric antigen receptor or a portion thereof. In some embodiments, the cell comprises an exogenous nucleic acid sequence encoding a T cell receptor R protein or a portion thereof, a T cell receptor a protein or a portion thereof, or a chimeric antigen receptor or a portion thereof. In some embodiments, the T cell receptor or chimeric antigen that specifically recognizes an antigen associated with the pathogenesis of an autoimmune condition, an allergic condition, or an inflammatory condition. In some embodiments (i) the autoimmune condition is selected from type 1 diabetes mellitus, multiple sclerosis, systemic lupus erythematosus, myasthenia gravis, rheumatoid arthritis, early onset rheumatoid arthritis, ankylosing spondylitis, immune-mediated pregnancy loss, immune-mediated recurrent pregnancy loss, dermatomyositis psoriatic arthritis, Crohn's disease, inflammatory bowel disease (IBD), ulcerative colitis, bullous pemphigoid, pemphigus vulgaris, autoimmune hepatitis, psoriasis, Sjogren's syndrome, or celiac disease; (ii) the allergic condition is selected from allergic asthma, steroid-resistant asthma, atopic dermatitis, celiac disease, pollen allergy, food allergy, drug hypersensitivity, or contact dermatitis; and (iii) the inflammatory condition is selected from pancreatic islet cell transplantation, asthma, hepatitis, traumatic brain injury, primary sclerosing cholangitis, primary biliary cholangitis, polymyositis, stroke, Still's disease, acute respiratory distress syndrome, uveitis inflammatory bowel disease (IBD), ulcerative colitis, graft-versus-host disease (GVHD), tolerance induction for transplantation, transplant rejection, or sepsis. In some embodiments, the inflammatory condition is primary biliary cholangitis. In some embodiments, the inflammatory condition is primary sclerosing cholangitis. In some embodiments, the inflammatory condition is autoimmune hepatitis. In some embodiments, the autoimmune condition is type 1 diabetes. In some embodiments, the inflammatory condition is islet cell transplantation. In some embodiments, the inflammatory condition is transplant rejection. In some embodiments, the autoimmune condition is multiple sclerosis. In some embodiments, the inflammatory condition is inflammatory bowel disease. In some embodiments, the inflammatory condition is acute respiratory distress syndrome. In some embodiments, the inflammatory condition is stroke. In some embodiments, the inflammatory condition is graft-versus-host disease.

[0550] Some embodiments include a pharmaceutical composition comprising any one of the foregoing cells and a pharmaceutically acceptable excipient.

[0551] Some embodiments include a method of editing a cell, comprising obtaining any one of the foregoing systems; introducing the first polynucleotide and the second polynucleotide into a cell to obtain a transduced cell; and culturing the transduced cell. Some embodiments also include contacting the transduced cell with the rapamycin or rapalog. In some embodiments, the rapamycin or rapalog is present in a concentration of 0.001 nM to 10 μM, or at a concentration between 0.001 nM and 10 μM, when contacting the cell. In some embodiments, the concentration is an amount from 0.001 nM to 0.01 nM, 0.01 nM to 0.1 nM, 0.1 nM to 1.0 nM, 1.0 nM to 10 nM, 10 nM to 100 nM, 100 nM to 1 μM, or 1 μM to 10 μM.

[0552] Certain sequences, which can be incorporated into one or more embodiments provided herein, are listed in TABLE 1. It should be understood that polynucleotides and polypeptides as contemplated herein may be without any tags (e.g., HA tags) that may be comprised within any sequences exemplified in Table 1. Further, Table 1 provides examples of sequences for nucleic acids encoding an FRB domain and amino acids of proteins comprising FRB domains. It should be understood that any of nucleic acids encoding either a naked FRB or an FRB domain as part of a first or second CISC component are configured so that the encoded protein, and any of the proteins provided herein, may (i) comprise a T75L mutation (see e.g., constructs 3312, 3323, 3333, 3354, or 3362; and respectively SEQ ID NOs: 1445, 1444, 1443, 1446, or 1447) in some embodiments; or (ii) not comprise a T75L mutation (see e.g., SEQ ID NOs: 1450, 1451, or 1452) in some embodiments. Table 1 also provides examples of sequences for nucleic acids encoding IL2Rβ signaling domain as part of a first of second CISC component, and amino acids of proteins comprising IL2Rβ signaling domains. Some versions of such sequences are truncated, and other versions are not. It is to be understood that any of nucleic acids encoding a IL2Rβ signaling domain as provided herein may (i) comprise or encode a truncated version of IL2Rβ signaling domain (see e.g., constructs 3323, 3354, or 3333; or SEQ ID NOs: 1444, 1446, or 1443) in some embodiments, or (ii) comprise or encode an untruncated version of IL2Rβ signaling domain (see e.g., constructs 3312, 3354, or 3362; or SEQ ID NOs: 1445, 1446, 1447, 1451, or 1455).

TABLE 1

| Feature | |
|---|---|
| (SEQ ID | |
| NO) | Sequence |
| IL2Rγ- | MPLGLLWLGLALLGALHAQAGVQVETISPGDGRTFPKRGQTCVVHYTGMLEDGKK |
| CISC | FDSSRDRNKPFKFMLGKQEVIRGWEEGVAQMSVGQRAKLTISPDYAYGATGHPGI |
| polypeptide | IPPHATLVFDVELLKLGEGSNTSKENPFLFALEAVVISVGSMGLIISLLCVYFWL |
| SEQ ID | ERTMPRIPTLKNLEDLVTEYHGNFSAWSGVSKGLAESLQPDYSERLCLVSEIPPK |
| NO: 1437 | GGALGEGPGASPCNQHSPYWAPPCYTLKPET |
| naked FRB | MEMWHEGLEEASRLYFGERNVKGMFEVLEPLHAMMERGPQTLKETSFNQAYGRDL |
| wild-type | MEAQEWCRKYMKSGNVKDLTQAWDLYYHVFRRISK |
| polypeptide | |
| SEQ ID | |
| NO: 1438 | |
| naked FRB | MEMWHEGLEEASRLYFGERNVKGMFEVLEPLHAMMERGPQTLKETSFNQAYGRDL |
| mutant | MEAQEWCRKYMKSGNVKDLLQAWDLYYHVFRRISK |
| polypeptide | |
| SEQ ID | |
| NO: 1439 | |
| FRB-CISC | MALPVTALLLPLALLLHAARPILWHEMWHEGLEEASRLYFGERNVKGMFEVLEPL |
| having a | HAMMERGPQTLKETSFNQAYGRDLMEAQEWCRKYMKSGNVKDLLQAWDLYYHVFR |
| truncated | RISKPAALGKDTIPWLGHLLVGLSGAFGFIILVYLLINCRNTGPWLKKVLKCNTP |
| intracellular | DPSKFFSQLSSEHGGDVQKWLSSPFPSSSFSPGGLAPEISPLEVLERDKVTQLLL |
| IL2Rβ | QQDKVPEPASLSLNTDAYLSLQELQ |
| domain | |
| SEQ ID | |
| NO: 1440 | |
| truncated | PAALGKDTIPWLGHLLVGLSGAFGFIILVYLLINCRNTGPWLKKVLKCNTPDPSK |
| IL2Rβ | FFSQLSSEHGGDVQKWLSSPFPSSSFSPGGLAPEISPLEVLERDKVTQLLLQQDK |
| SEQ ID | VPEPASLSLNTDAYLSLQELQ |
| NO: 1441 | |
| Construct | GTAGAAAAGATCAAAGGATCTTCTTGAGATCCTTTTTTTCTGCGCGTAATCTGCT |
| 3324 | GCTTGCAAACAAAAAAACCACCGCTACCAGCGGTGGTTTGTTTGCCGGATCAAGA |
| SEQ ID | GCTACCAACTCTTTTTCCGAAGGTAACTGGCTTCAGCAGAGCGCAGATACCAAAT |
| NO: 1442 | ACTGTCCTTCTAGTGTAGCCGTAGTTAGGCCACCACTTCAAGAACTCTGTAGCAC |
| | CGCCTACATACCTCGCTCTGCTAATCCTGTTACCAGTGGCTGCTGCCAGTGGCGA |
| | TAAGTCGTGTCTTACCGGGTTGGACTCAAGACGATAGTTACCGGATAAGGCGCAG |
| | CGGTCGGGCTGAACGGGGGGTTCGTGCACACAGCCCAGCTTGGAGCGAACGACCT |
| | ACACCGAACTGAGATACCTACAGCGTGAGCTATGAGAAAGCGCCACGCTTCCCGA |
| | AGGGAGAAAGGCGGACAGGTATCCGGTAAGCGGCAGGGTCGGAACAGGAGAGCGC |
| | ACGAGGGAGCTTCCAGGGGGAAACGCCTGGTATCTTTATAGTCCTGTCGGGTTTC |
| | GCCACCTCTGACTTGAGCGTCGATTTTTGTGATGCTCGTCAGGGGGGCGGAGCCT |
| | ATGGAAAAACGCCAGCAACGCGGCCTTTTTACGGTTCCTGGCCTTTTGCTGGCCT |
| | TTTGCTCACATGTTCTTTCCTGCGTTATCCCCTGATTCTGTGGATAACCGTATTA |
| | CCGCCTTTGAGTGAGCTGATACCGCTCGCCGCAGCCGAACGACCGAGCGCAGCGA |
| | GTCAGTGAGCGAGGAAGCGGAAGAGCGCCCAATACGCAAACCGCCTCTCCCCGCG |
| | CGTTGGCCGATTCATTAATGCAGCTGCGCGCTCGCTCGCTCACTGAGGCCGCCCG |
| | GGCAAAGCCCGGGCGTCGGGCGACCTTTGGTCGCCCGGCCTCAGTGAGCGAGCGA |
| | GCGCGCAGAGAGGGAGTGGCCAACTCCATCACTAGGGGTTCCTTGTAGTTAATGA |
| | TTAACCCGCCATGCTACTTATCTACGTAGCGGCCGCAGCCTGTGCAGGGTGCAGG |
| | GAGGGCTAGAGGCCTGAGGCTTGAAACAGCTCTCAAGTGGAGGGGGAAACAACCA |
| | TTGCCCTCATAGAGGACACATCCACACCAGGGCTGTGCTAGCGTGGGCAGGCAAG |
| | CCAGGTGCTGGACCTCTGCACGTGGGGCATGTGTGGGTATGTACATGTACCTGTG |
| | TTCTTGGTGTGTGTGTGTGTGTGTGTGTGTGTGTGTGTCTAGAGCTGGGGTGCAA |
| | CTATGGGGCCCCTCGGGACATGTCCCAGCCAATGCCTGCTTTGACCAGAGGAGTG |
| | TCCACGTGGCTCAGGTGGTCGAGTATCTCATACCGCCCTAGCACACGTGTGACTC |
| | CTTTCCCCTATTGTCTACGCAGCCTGCCCTTGGACAAGGACCCGATGCCCAACCC |
| | CAGGCCTGGCAAGCCCTCGGCCCCTTCCTTGGCCCTTGGCCCATCCCCACGCGTA |
| | GGAACAGAGAAACAGGAGAATATGGGCCAAACAGGATATCTGTGGTAAGCAGTTC |
| | CTGCCCCGGCTCAGGGCCAAGAACAGTTGGAACAGCAGAATATGGGCCAAACAGG |
| | ATATCTGTGGTAAGCAGTTCCTGCCCCGGCTCAGGGCCAAGAACAGATGGTCCCC |
| | AGATGCGGTCCCGCCCTCAGCAGTTTCTAGAGAACCATCAGATGTTTCCAGGGTG |
| | CCCCAAGGACCTGAAATGACCCTGTGCCTTATTTGAACTAACCAATCAGTTCGCT |
| | TCTCGCTTCTGTTCGCGCGCTTCTGCTCCCCGAGCTCTATATAAGCAGAGCTCGT |
| | TTAGTGAACCGTCAGATCGCCTGGAGACGCCATCCACGCTGTTTTGACTTCCATA |
| | GAAGGATCTCGAGGCCACCATGCCACTGGGACTGCTGTGGCTTGGACTGGCCCTT |
| | CTTGGAGCACTGCATGCTCAGGCTGGCGTGCAGGTCGAGACAATTAGTCCTGGCG |
| | ACGGCCGGACCTTTCCTAAGCGAGGACAGACATGCGTGGTGCACTACACCGGCAT |
| | GCTGGAAGATGGCAAGAAGTTCGACAGCAGCCGGGACAGAAACAAGCCTTTCAAG |
| | TTCATGCTGGGCAAGCAAGAAGTGATCAGAGGCTGGGAAGAGGGCGTCGCCCAGA |
| | TGTCTGTTGGACAGAGAGCCAAGCTGACAATCAGCCCCGATTACGCCTATGGCGC |
| | CACAGGACACCCTGGGATCATTCCTCCACATGCCACACTGGTGTTCGATGTGGAA |
| | CTGCTGAAGCTCGGCGAAGGCAGCAATACCAGCAAAGAGAACCCCTTCCTGTTCG |
| | CCCTGGAAGCCGTGGTTATCAGCGTGGGATCTATGGGCCTGATCATCTCCCTGCT |
| | GTGCGTGTACTTCTGGCTGGAACGGACCATGCCTCGGATCCCCACACTGAAGAAT |
| | CTGGAAGATCTGGTCACCGAGTACCACGGCAATTTCAGCGCTTGGAGTGGCGTGT |
| | CCAAAGGCCTGGCTGAAAGCCTGCAGCCTGACTACTCTGAGAGACTGTGCCTGGT |
| | GTCTGAGATCCCTCCTAAAGGCGGCGCTCTCGGAGAAGGACCAGGCGCTTCTCCA |
| | TGCAATCAGCACAGCCCTTATTGGGCCCCTCCTTGCTACACCCTGAAGCCTGAAA |
| | CTGGATCCGGCGCCACCAACTTTAGTCTGCTCAAGCAAGCCGGGGACGTCGAGGA |
| | AAATCCTGGGCCAGAAATGTGGCACGAAGGACTCGAGGAAGCCAGTCGGCTGTAT |
| | TTTGGCGAGCGGAATGTGAAAGGGATGTTTGAAGTGCTCGAGCCTCTCCACGCTA |
| | TGATGGAACGGGGACCCCAGACTCTCAAAGAAACCAGCTTTAATCAGGCTTACGG |
| | ACGCGACCTCATGGAAGCTCAAGAATGGTGTAGAAAGTATATGAAGAGTGGCAAC |
| | GTGAAAGATCTGCTGCAAGCCTGGGATCTCTATTATCACGTGTTCAGACGCATCA |
| | GCAAAGGCAGCGGCGCCACAAATTTCTCCCTGCTGAAACAGGCCGGCGACGTGGA |
| | AGAGAATCCCGGACCTTATCCATACGATGTCCCAGATTATGCGCCCAATCCTAGA |
| | CCTGGCAAGCCCAGCGCTCCTTCTCTTGCTCTTGGACCTTCTCCTGGTGCCTCGC |
| | CCAGCTGGAGGGCTGCACCCAAAGCCTCAGACCTGCTGGGGGCCCGGGGCCCAGG |
| | GGGAACCTTCCAGGGCCGAGATCTTCGAGGCGGGGCCCATGCCTCCTCTTCTTCC |
| | TTGAACCCCATGCCACCATCGCAGCTGCAGGTGAGGCCCTGGGCCCAGGATGGGG |
| | CAGGCAGGGTGGGGTACCTGGACCTACAGGTGCCGACCTTTACTGTGGCACTGGG |
| | CGGGAGGGGGGCTGGCTGGGGCACAGGAAGTGGTTTCTGGGTCCCAGGCAAGTCT |
| | GTGACTTATGCAGATGTTGCAGGGCCAAGAAAATCCCCACCTGCCAGGCCTCAGA |
| | GATTGGAGGCTCTCCCCGACCTCCCAATCCCTGTCTCAGGAGAGGAGGAGGCCGT |
| | ATTGTAGTCCCATGAGCATAGCTATGTGTCCCCATCCCCATGTGACAAGAGAAGA |
| | GGAGGATCCTACGTAGATAAGTAGCATGGCGGGTTAATCATTAACTACAAGGAAC |
| | CCCTAGTGATGGAGTTGGCCACTCCCTCTCTGCGCGCTCGCTCGCTCACTGAGGC |
| | CGGGCGACCAAAGGTCGCCCGACGCCCGGGCTTTGCCCGGGCGGCCTCAGTGAGC |
| | GAGCGAGCGCGCCAGCTGGCGTAATAGCGAAGAGGCCCGCACCGATCGCCCTTCC |
| | CAACAGTTGCGCAGCCTGAATGGCGAATGGCGATTCCGTTGCAATGGCTGGCGGT |
| | AATATTGTTCTGGATATTACCAGCAAGGCCGATAGTTTGAGTTCTTCTACTCAGG |
| | CAAGTGATGTTATTACTAATCAAAGAAGTATTGCGACAACGGTTAATTTGCGTGA |
| | TGGACAGACTCTTTTACTCGGTGGCCTCACTGATTATAAAAACACTTCTCAGGAT |
| | TCTGGCGTACCGTTCCTGTCTAAAATCCCTTTAATCGGCCTCCTGTTTAGCTCCC |
| | GCTCTGATTCTAACGAGGAAAGCACGTTATACGTGCTCGTCAAAGCAACCATAGT |
| | ACGCGCCCTGTAGCGGCGCATTAAGCGCGGCGGGTGTGGTGGTTACGCGCAGCGT |
| | GACCGCTACACTTGCCAGCGCCCTAGCGCCCGCTCCTTTCGCTTTCTTCCCTTCC |
| | TTTCTCGCCACGTTCGCCGGCTTTCCCCGTCAAGCTCTAAATCGGGGGCTCCCTT |
| | TAGGGTTCCGATTTAGTGCTTTACGGCACCTCGACCCCAAAAAACTTGATTAGGG |
| | TGATGGTTCACGTAGTGGGCCATCGCCCTGATAGACGGTTTTTCGCCCTTTGACG |
| | TTGGAGTCCACGTTCTTTAATAGTGGACTCTTGTTCCAAACTGGAACAACACTCA |
| | ACCCTATCTCGGTCTATTCTTTTGATTTATAAGGGATTTTGCCGATTTCGGCCTA |
| | TTGGTTAAAAAATGAGCTGATTTAACAAAAATTTAACGCGAATTTTAACAAAATA |
| | TTAACGTTTACAATTTAAATATTTGCTTATACAATCTTCCTGTTTTTGGGGCTTT |
| | TCTGATTATCAACCGGGGTACATATGATTGACATGCTAGTTTTACGATTACCGTT |
| | CATCGATTCTCTTGTTTGCTCCAGACTCTCAGGCAATGACCTGATAGCCTTTGTA |
| | GAGACCTCTCAAAAATAGCTACCCTCTCCGGCATGAATTTATCAGCTAGAACGGT |
| | TGAATATCATATTGATGGTGATTTGACTGTCTCCGGCCTTTCTCACCCGTTTGAA |
| | TCTTTACCTACACATTACTCAGGCATTGCATTTAAAATATATGAGGGTTCTAAAA |
| | ATTTTTATCCTTGCGTTGAAATAAAGGCTTCTCCCGCAAAAGTATTACAGGGTCA |
| | TAATGTTTTTGGTACAACCGATTTAGCTTTATGCTCTGAGGCTTTATTGCTTAAT |
| | TTTGCTAATTCTTTGCCTTGCCTGTATGATTTATTGGATGTTGGAATCGCCTGAT |
| | GCGGTATTTTCTCCTTACGCATCTGTGCGGTATTTCACACCGCATATGGTGCACT |
| | CTCAGTACAATCTGCTCTGATGCCGCATAGTTAAGCCAGCCCCGACACCCGCCAA |
| | CACCCGCTGACGCGCCCTGACGGGCTTGTCTGCTCCCGGCATCCGCTTACAGACA |
| | AGCTGTGACCGTCTCCGGGAGCTGCATGTGTCAGAGGTTTTCACCGTCATCACCG |
| | AAACGCGCGAGACGAAAGGGCCTCGTGATACGCCTATTTTTATAGGTTAATGTCA |
| | TGATAATAATGGTTTCTTAGACGTCAGGTGGCACTTTTCGGGGAAATGTGCGCGG |
| | AACCCCTATTTGTTTATTTTTCTAAATACATTCAAATATGTATCCGCTCATGAGA |
| | CAATAACCCTGATAAATGCTTCAATAATATTGAAAAAGGAAGAGTATGAGTATTC |
| | AACATTTCCGTGTCGCCCTTATTCCCTTTTTTGCGGCATTTTGCCTTCCTGTTTT |
| | TGCTCACCCAGAAACGCTGGTGAAAGTAAAAGATGCTGAAGATCAGTTGGGTGCA |
| | CGAGTGGGTTACATCGAACTGGATCTCAACAGCGGTAAGATCCTTGAGAGTTTTC |
| | GCCCCGAAGAACGTTTTCCAATGATGAGCACTTTTAAAGTTCTGCTATGTGGCGC |
| | GGTATTATCCCGTATTGACGCCGGGCAAGAGCAACTCGGTCGCCGCATACACTAT |
| | TCTCAGAATGACTTGGTTGAGTACTCACCAGTCACAGAAAAGCATCTTACGGATG |
| | GCATGACAGTAAGAGAATTATGCAGTGCTGCCATAACCATGAGTGATAACACTGC |
| | GGCCAACTTACTTCTGACAACGATCGGAGGACCGAAGGAGCTAACCGCTTTTTTG |
| | CACAACATGGGGGATCATGTAACTCGCCTTGATCGTTGGGAACCGGAGCTGAATG |
| | AAGCCATACCAAACGACGAGCGTGACACCACGATGCCTGTAGCAATGGCAACAAC |
| | GTTGCGCAAACTATTAACTGGCGAACTACTTACTCTAGCTTCCCGGCAACAATTA |
| | ATAGACTGGATGGAGGCGGATAAAGTTGCAGGACCACTTCTGCGCTCGGCCCTTC |
| | CGGCTGGCTGGTTTATTGCTGATAAATCTGGAGCCGGTGAGCGTGGGTCTCGCGG |
| | TATCATTGCAGCACTGGGGCCAGATGGTAAGCCCTCCCGTATCGTAGTTATCTAC |
| | ACGACGGGGAGTCAGGCAACTATGGATGAACGAAATAGACAGATCGCTGAGATAG |
| | GTGCCTCACTGATTAAGCATTGGTAACTGTCAGACCAAGTTTACTCATATATACT |
| | TTAGATTGATTTAAAACTTCATTTTTAATTTAAAAGGATCTAGGTGAAGATCCTT |
| | TTTGATAATCTCATGACCAAAATCCCTTAACGTGAGTTTTCGTTCCACTGAGCGT |
| | CAGACCCC |
| Construct | GTAGAAAAGATCAAAGGATCTTCTTGAGATCCTTTTTTTCTGCGCGTAATCTGCT |
| 3333 | GCTTGCAAACAAAAAAACCACCGCTACCAGCGGTGGTTTGTTTGCCGGATCAAGA |
| SEQ ID | GCTACCAACTCTTTTTCCGAAGGTAACTGGCTTCAGCAGAGCGCAGATACCAAAT |
| NO: 1443 | ACTGTCCTTCTAGTGTAGCCGTAGTTAGGCCACCACTTCAAGAACTCTGTAGCAC |
| | CGCCTACATACCTCGCTCTGCTAATCCTGTTACCAGTGGCTGCTGCCAGTGGCGA |
| | TAAGTCGTGTCTTACCGGGTTGGACTCAAGACGATAGTTACCGGATAAGGCGCAG |
| | CGGTCGGGCTGAACGGGGGGTTCGTGCACACAGCCCAGCTTGGAGCGAACGACCT |
| | ACACCGAACTGAGATACCTACAGCGTGAGCTATGAGAAAGCGCCACGCTTCCCGA |
| | AGGGAGAAAGGCGGACAGGTATCCGGTAAGCGGCAGGGTCGGAACAGGAGAGCGC |
| | ACGAGGGAGCTTCCAGGGGGAAACGCCTGGTATCTTTATAGTCCTGTCGGGTTTC |
| | GCCACCTCTGACTTGAGCGTCGATTTTTGTGATGCTCGTCAGGGGGGCGGAGCCT |
| | ATGGAAAAACGCCAGCAACGCGGCCTTTTTACGGTTCCTGGCCTTTTGCTGGCCT |
| | TTTGCTCACATGTTCTTTCCTGCGTTATCCCCTGATTCTGTGGATAACCGTATTA |
| | CCGCCTTTGAGTGAGCTGATACCGCTCGCCGCAGCCGAACGACCGAGCGCAGCGA |
| | GTCAGTGAGCGAGGAAGCGGAAGAGCGCCCAATACGCAAACCGCCTCTCCCCGCG |
| | CGTTGGCCGATTCATTAATGCAGCTGCGCGCTCGCTCGCTCACTGAGGCCGCCCG |
| | GGCAAAGCCCGGGCGTCGGGCGACCTTTGGTCGCCCGGCCTCAGTGAGCGAGCGA |
| | GCGCGCAGAGAGGGAGTGGCCAACTCCATCACTAGGGGTTCCTTGTAGTTAATGA |
| | TTAACCCGCCATGCTACTTATCTACGTAGCGGCCGCACTGAAATCATGGCCTCTT |
| | GGCCAAGATTGATAGCTTGTGCCTGTCCCTGAGTCCCAGTCCATCACGAGCAGCT |
| | GGTTTCTAAGATGCTATTTCCCGTATAAAGCATGAGACCGTGACTTGCCAGCCCC |
| | ACAGAGCCCCGCCCTTGTCCATCACTGGCATCTGGACTCCAGCCTGGGTTGGGGC |
| | AAAGAGGGAAATGAGATCATGTCCTAACCCTGATCCTCTTGTCCCACAGATATCC |
| | AGAACCCTGACCCTGCCGTGTACCAGCTGAGAGACTCTAAATCCAGTGACAAGTC |
| | TGTCTGCCTATATTAAGGAACAGAGAAACAGGAGAATATGGGCCAAACAGGATAT |
| | CTGTGGTAAGCAGTTCCTGCCCCGGCTCAGGGCCAAGAACAGTTGGAACAGCAGA |
| | ATATGGGCCAAACAGGATATCTGTGGTAAGCAGTTCCTGCCCCGGCTCAGGGCCA |
| | AGAACAGATGGTCCCCAGATGCGGTCCCGCCCTCAGCAGTTTCTAGAGAACCATC |
| | AGATGTTTCCAGGGTGCCCCAAGGACCTGAAATGACCCTGTGCCTTATTTGAACT |
| | AACCAATCAGTTCGCTTCTCGCTTCTGTTCGCGCGCTTCTGCTCCCCGAGCTCTA |
| | TATAAGCAGAGCTCGTTTAGTGAACCGTCAGATCGCCTGGAGACGCCATCCACGC |
| | TGTTTTGACTTCCATAGAAGGATCTCGAGTAGCATGGGATCAAGACTGCTGTGCT |
| | GGGTGCTGCTGTGCCTGCTGGGAGCCGGACCTGTGAAAGCCGGGGTGACTCAGAC |
| | TCCACGATACCTGATCAAGACCAGGGGCCAGCAGGTGACACTGTCTTGCAGCCCA |
| | ATCTCCGGACACCGCTCCGTGTCTTGGTACCAGCAGACCCCTGGACAGGGACTGC |
| | AGTTCCTGTTTGAGTATTTCTCTGAGACACAGCGGAACAAGGGCAATTTCCCCGG |
| | CCGGTTTAGCGGCAGACAGTTTAGCAACTCCAGGTCTGAGATGAATGTGAGCACC |
| | CTGGAGCTGGGCGACTCCGCCCTGTACCTGTGCGCAAGCTCCCTGGCCCTGGGAC |
| | AGGGGAATCAGCAGTTTTTCGGACCCGGAACAAGGCTGACCGTGCTGGAGGATCT |
| | ACGTAACGTGACACCACCCAAAGTCTCACTGTTTGAGCCTAGCAAGGCAGAAATT |
| | GCCAACAAGCAGAAGGCCACCCTGGTGTGCCTGGCAAGAGGGTTCTTTCCAGATC |
| | ACGTGGAGCTGTCCTGGTGGGTCAACGGCAAAGAAGTGCATTCTGGGGTCTGCAC |
| | CGACCCCCAGGCTTACAAGGAGAGTAATTACTCATATTGTCTGTCAAGCCGGCTG |
| | AGAGTGTCCGCCACATTCTGGCACAACCCTAGGAATCATTTCCGCTGCCAGGTCC |
| | AGTTTCACGGCCTGAGTGAGGAAGATAAATGGCCAGAGGGGTCACCTAAGCCAGT |
| | GACACAGAACATCAGCGCAGAAGCCTGGGGACGAGCAGACTGTGGCATTACTAGC |
| | GCCTCCTATCATCAGGGCGTGCTGAGCGCCACTATCCTGTACGAGATTCTGCTGG |
| | GAAAGGCCACCCTGTATGCTGTGCTGGTCTCCGGCCTGGTGCTGATGGCCATGGT |
| | CAAGAAAAAGAACTCTGGGAGTGGAGCCACAAATTTCTCTCTGCTGAAACAGGCT |
| | GGAGATGTGGAGGAAAACCCCGGCCCTATGAAGAGCCTGCGCGTGCTGCTGGTCA |
| | TCCTGTGGCTGCAATTGAGTTGGGTGTGGAGCCAGAAGGACCAGGTGTTTCAGCC |
| | TAGCACTGTCGCATCATCAGAGGGGGCCGTCGTGGAAATCTTTTGTAATCACAGC |
| | GTGTCCAACGCCTACAATTTCTTTTGGTATCTGCACTTCCCAGGATGCGCACCTA |
| | GGCTGCTGGTGAAGGGCTCTAAGCCCAGCCAGCAGGGCCGGTACAACATGACCTA |
| | TGAGCGGTTCAGCTCCTCTCTGCTGATCCTGCAGGTGCGGGAGGCAGACGCAGCC |
| | GTGTACTATTGTGCCGTGGAGGATCTGAATCAGGCCGGCACAGCCCTGATTTTCG |
| | GCAAAGGAACAACCCTGAGCGTGAGCAGCGACATCCAGAACCCTGAGCCCGCCGT |
| | ATACCAGCTGAAGGACCCCCGATCTCAGGATAGTACTCTGTGCCTGTTCACCGAC |
| | TTTGATAGTCAGATCAATGTGCCTAAAACCATGGAATCCGGAACTTTTATTACCG |
| | ACAAGTGCGTGCTGGATATGAAAGCCATGGACAGTAAGTCAAACGGCGCCATCGC |
| | TTGGAGCAATCAGACATCCTTCACTTGCCAGGATATCTTCAAGGAGACCAACGCA |
| | ACATACCCATCCTCTGACGTGCCCTGTGATGCCACCCTGACAGAGAAGTCTTTCG |
| | AAACAGACATGAACCTGAATTTTCAGAATCTGAGCGTGATGGGCCTGAGAATCCT |
| | GCTGCTGAAGGTCGCTGGGTTTAATCTGCTGATGACACTGCGGCTGTGGTCCTCA |
| | GGATCTGGTGCTACTAATTTTTCTCTTTTGAAGCAAGCTGGAGATGTTGAAGAGA |
| | ACCCCGGTCCGATGGCTCTGCCAGTGACAGCTCTGCTGCTTCCTCTGGCTCTGTT |
| | GCTGCATGCCGCCAGACCTATTCTGTGGCACGAGATGTGGCATGAAGGCCTGGAA |
| | GAGGCCTCCAGACTGTACTTCGGCGAGAGAAACGTGAAGGGCATGTTCGAGGTGC |
| | TGGAACCCCTGCATGCCATGATGGAAAGAGGCCCTCAGACACTGAAAGAGACTAG |
| | CTTCAACCAGGCCTACGGCCGGGATCTGATGGAAGCCCAAGAGTGGTGCCGGAAG |
| | TACATGAAGTCCGGCAATGTGAAGGACCTCCTGCAGGCATGGGACCTGTACTACC |
| | ACGTGTTCCGGQGGATCTCTAAGGGCAAAGACACAATCCCTTGGCTGGGCCATCT |
| | GCTCGTTGGACTGTCTGGCGCCTTCGGCTTCATCATCCTGGTGTACCTGCTGATC |
| | AACTGTCGGAACACAGGCCCATGGCTGAAGAAAGTGCTGAAGTGCAACACCCCTG |
| | ATCCGAGCAAGTTCTTTAGCCAGCTGTCCAGCGAGCACGGCGGAGATGTTCAGAA |
| | GTGGCTGAGCAGCCCATTTCCTAGCAGCAGCTTTAGCCCTGGCGGACTGGCTCCT |
| | GAGATCAGCCCACTGGAAGTGCTGGAAAGGGACAAAGTGACCCAGCTGCTCCTGC |
| | AACAGGACAAGGTGCCAGAACCTGCCAGCCTGTCTTAAAAGCTTAATTGAGCGGC |
| | CGCGCTTTATTTGTGAAATTTGTGATGCTATTGCTTTATTTGTAACCATTATAAG |
| | CTGCAATAAACAAGTTAACAACAACAATTGCATTCATTTTATGTTTCAGGTTCAG |
| | GGGGAGATGTGGGAGGTTTTTTAAAGCTCACCGATTTTGATTCTCAAACAAATGT |
| | GTCACAAAGTAAGGATTCTGATGTGTATATCACAGACAAAACTGTGCTAGACATG |
| | AGGTCTATGGACTTCAAGAGCAACAGTGCTGTGGCCTGGAGCAACAAATCTGACT |
| | TTGCATGTGCAAACGCCTTCAACAACAGCATTATTCCAGAAGACACCTTCTTCCC |
| | CAGCCCAGGTAAGGGCAGCTTTGGTGCCTTCGCAGGCTGTTTCCTTGCTTCAGGA |
| | ATGGCCAGGTTCTGCCCAGAGCTCTGGTCAATGATGTCTAAAACTCCTCTGATTG |
| | GTGGTCTCGGCGCGGCCGCTACGTAGATAAGTAGCATGGCGGGTTAATCATTAAC |
| | TACAAGGAACCCCTAGTGATGGAGTTGGCCACTCCCTCTCTGCGCGCTCGCTCGC |
| | TCACTGAGGCCGGGCGACCAAAGGTCGCCCGACGCCCGGGCTTTGCCCGGGCGGC |
| | CTCAGTGAGCGAGCGAGCGCGCCAGCTGGCGTAATAGCGAAGAGGCCCGCACCGA |
| | TCGCCCTTCCCAACAGTTGCGCAGCCTGAATGGCGAATGGCGATTCCGTTGCAAT |
| | GGCTGGCGGTAATATTGTTCTGGATATTACCAGCAAGGCCGATAGTTTGAGTTCT |
| | TCTACTCAGGCAAGTGATGTTATTACTAATCAAAGAAGTATTGCGACAACGGTTA |
| | ATTTGCGTGATGGACAGACTCTTTTACTCGGTGGCCTCACTGATTATAAAAACAC |
| | TTCTCAGGATTCTGGCGTACCGTTCCTGTCTAAAATCCCTTTAATCGGCCTCCTG |
| | TTTAGCTCCCGCTCTGATTCTAACGAGGAAAGCACGTTATACGTGCTCGTCAAAG |
| | CAACCATAGTACGCGCCCTGTAGCGGCGCATTAAGCGCGGCGGGTGTGGTGGTTA |
| | CGCGCAGCGTGACCGCTACACTTGCCAGCGCCCTAGCGCCCGCTCCTTTCGCTTT |
| | CTTCCCTTCCTTTCTCGCCACGTTCGCCGGCTTTCCCCGTCAAGCTCTAAATCGG |
| | GGGCTCCCTTTAGGGTTCCGATTTAGTGCTTTACGGCACCTCGACCCCAAAAAAC |
| | TTGATTAGGGTGATGGTTCACGTAGTGGGCCATCGCCCTGATAGACGGTTTTTCG |
| | CCCTTTGACGTTGGAGTCCACGTTCTTTAATAGTGGACTCTTGTTCCAAACTGGA |
| | ACAACACTCAACCCTATCTCGGTCTATTCTTTTGATTTATAAGGGATTTTGCCGA |
| | TTTCGGCCTATTGGTTAAAAAATGAGCTGATTTAACAAAAATTTAACGCGAATTT |
| | TAACAAAATATTAACGTTTACAATTTAAATATTTGCTTATACAATCTTCCTGTTT |
| | TTGGGGCTTTTCTGATTATCAACCGGGGTACATATGATTGACATGCTAGTTTTAC |
| | GATTACCGTTCATCGATTCTCTTGTTTGCTCCAGACTCTCAGGCAATGACCTGAT |
| | AGCCTTTGTAGAGACCTCTCAAAAATAGCTACCCTCTCCGGCATGAATTTATCAG |
| | CTAGAACGGTTGAATATCATATTGATGGTGATTTGACTGTCTCCGGCCTTTCTCA |
| | CCCGTTTGAATCTTTACCTACACATTACTCAGGCATTGCATTTAAAATATATGAG |
| | GGTTCTAAAAATTTTTATCCTTGCGTTGAAATAAAGGCTTCTCCCGCAAAAGTAT |
| | TACAGGGTCATAATGTTTTTGGTACAACCGATTTAGCTTTATGCTCTGAGGCTTT |
| | ATTGCTTAATTTTGCTAATTCTTTGCCTTGCCTGTATGATTTATTGGATGTTGGA |
| | ATCGCCTGATGCGGTATTTTCTCCTTACGCATCTGTGCGGTATTTCACACCGCAT |
| | ATGGTGCACTCTCAGTACAATCTGCTCTGATGCCGCATAGTTAAGCCAGCCCCGA |
| | CACCCGCCAACACCCGCTGACGCGCCCTGACGGGCTTGTCTGCTCCCGGCATCCG |
| | CTTACAGACAAGCTGTGACCGTCTCCGGGAGCTGCATGTGTCAGAGGTTTTCACC |
| | GTCATCACCGAAACGCGCGAGACGAAAGGGCCTCGTGATACGCCTATTTTTATAG |
| | GTTAATGTCATGATAATAATGGTTTCTTAGACGTCAGGTGGCACTTTTCGGGGAA |
| | ATGTGCGCGGAACCCCTATTTGTTTATTTTTCTAAATACATTCAAATATGTATCC |
| | GCTCATGAGACAATAACCCTGATAAATGCTTCAATAATATTGAAAAAGGAAGAGT |
| | ATGAGTATTCAACATTTCCGTGTCGCCCTTATTCCCTTTTTTGCGGCATTTTGCC |
| | TTCCTGTTTTTGCTCACCCAGAAACGCTGGTGAAAGTAAAAGATGCTGAAGATCA |
| | GTTGGGTGCACGAGTGGGTTACATCGAACTGGATCTCAACAGCGGTAAGATCCTT |
| | GAGAGTTTTCGCCCCGAAGAACGTTTTCCAATGATGAGCACTTTTAAAGTTCTGC |
| | TATGTGGCGCGGTATTATCCCGTATTGACGCCGGGCAAGAGCAACTCGGTCGCCG |
| | CATACACTATTCTCAGAATGACTTGGTTGAGTACTCACCAGTCACAGAAAAGCAT |
| | CTTACGGATGGCATGACAGTAAGAGAATTATGCAGTGCTGCCATAACCATGAGTG |
| | ATAACACTGCGGCCAACTTACTTCTGACAACGATCGGAGGACCGAAGGAGCTAAC |
| | CGCTTTTTTGCACAACATGGGGGATCATGTAACTCGCCTTGATCGTTGGGAACCG |
| | GAGCTGAATGAAGCCATACCAAACGACGAGCGTGACACCACGATGCCTGTAGCAA |
| | TGGCAACAACGTTGCGCAAACTATTAACTGGCGAACTACTTACTCTAGCTTCCCG |
| | GCAACAATTAATAGACTGGATGGAGGCGGATAAAGTTGCAGGACCACTTCTGCGC |
| | TCGGCCCTTCCGGCTGGCTGGTTTATTGCTGATAAATCTGGAGCCGGTGAGCGTG |
| | GGTCTCGCGGTATCATTGCAGCACTGGGGCCAGATGGTAAGCCCTCCCGTATCGT |
| | AGTTATCTACACGACGGGGAGTCAGGCAACTATGGATGAACGAAATAGACAGATC |
| | GCTGAGATAGGTGCCTCACTGATTAAGCATTGGTAACTGTCAGACCAAGTTTACT |
| | CATATATACTTTAGATTGATTTAAAACTTCATTTTTAATTTAAAAGGATCTAGGT |
| | GAAGATCCTTTTTGATAATCTCATGACCAAAATCCCTTAACGTGAGTTTTCGTTC |
| | CACTGAGCGTCAGACCCC |
| Construct | GTAGAAAAGATCAAAGGATCTTCTTGAGATCCTTTTTTTCTGCGCGTAATCTGCT |
| 3323 | GCTTGCAAACAAAAAAACCACCGCTACCAGCGGTGGTTTGTTTGCCGGATCAAGA |
| SEQ ID | GCTACCAACTCTTTTTCCGAAGGTAACTGGCTTCAGCAGAGCGCAGATACCAAAT |
| NO: 1444 | ACTGTCCTTCTAGTGTAGCCGTAGTTAGGCCACCACTTCAAGAACTCTGTAGCAC |
| | CGCCTACATACCTCGCTCTGCTAATCCTGTTACCAGTGGCTGCTGCCAGTGGCGA |
| | TAAGTCGTGTCTTACCGGGTTGGACTCAAGACGATAGTTACCGGATAAGGCGCAG |
| | CGGTCGGGCTGAACGGGGGGTTCGTGCACACAGCCCAGCTTGGAGCGAACGACCT |
| | ACACCGAACTGAGATACCTACAGCGTGAGCTATGAGAAAGCGCCACGCTTCCCGA |
| | AGGGAGAAAGGCGGACAGGTATCCGGTAAGCGGCAGGGTCGGAACAGGAGAGCGC |
| | ACGAGGGAGCTTCCAGGGGGAAACGCCTGGTATCTTTATAGTCCTGTCGGGTTTC |
| | GCCACCTCTGACTTGAGCGTCGATTTTTGTGATGCTCGTCAGGGGGGCGGAGCCT |
| | ATGGAAAAACGCCAGCAACGCGGCCTTTTTACGGTTCCTGGCCTTTTGCTGGCCT |
| | TTTGCTCACATGTTCTTTCCTGCGTTATCCCCTGATTCTGTGGATAACCGTATTA |
| | CCGCCTTTGAGTGAGCTGATACCGCTCGCCGCAGCCGAACGACCGAGCGCAGCGA |
| | GTCAGTGAGCGAGGAAGCGGAAGAGCGCCCAATACGCAAACCGCCTCTCCCCGCG |
| | CGTTGGCCGATTCATTAATGCAGCTGCGCGCTCGCTCGCTCACTGAGGCCGCCCG |
| | GGCAAAGCCCGGGCGTCGGGCGACCTTTGGTCGCCCGGCCTCAGTGAGCGAGCGA |
| | GCGCGCAGAGAGGGAGTGGCCAACTCCATCACTAGGGGTTCCTTGTAGTTAATGA |
| | TTAACCCGCCATGCTACTTATCTACGTACCCTATTAAATAAAAGAATAAGCAGTA |
| | TTATTAAGTAGCCCTGCATTTCAGGTTTCCTTGAGTGGCAGGCCAGGCCTGGCCG |
| | TGAACGTTCACTGAAATCATGGCCTCTTGGCCAAGATTGATAGCTTGTGCCTGTC |
| | CCTGAGTCCCAGTCCATCACGAGCAGCTGGTTTCTAAGATGCTATTTCCCGTATA |
| | AAGCATGAGACCGTGACTTGCCAGCCCCACAGAGCCCCGCCCTTGTCCATCACTG |
| | GCATCTGGACTCCAGCCTGGGTTGGGGCAAAGAGGGAAATGAGATCATGTCCTAC |
| | GCGTAGGAACAGAGAAACAGGAGAATATGGGCCAAACAGGATATCTGTGGTAAGC |
| | AGTTCCTGCCCCGGCTCAGGGCCAAGAACAGTTGGAACAGCAGAATATGGGCCAA |
| | ACAGGATATCTGTGGTAAGCAGTTCCTGCCCCGGCTCAGGGCCAAGAACAGATGG |
| | TCCCCAGATGCGGTCCCGCCCTCAGCAGTTTCTAGAGAACCATCAGATGTTTCCA |
| | GGGTGCCCCAAGGACCTGAAATGACCCTGTGCCTTATTTGAACTAACCAATCAGT |
| | TCGCTTCTCGCTTCTGTTCGCGCGCTTCTGCTCCCCGAGCTCTATATAAGCAGAG |
| | CTCGTTTAGTGAACCGTCAGATCGCCTGGAGACGCCATCCACGCTGTTTTGACTT |
| | CCATAGAAGGATCATGGCTCTGCCAGTGACAGCTCTGCTGCTTCCTCTGGCTCTG |
| | TTGCTGCATGCCGCCAGACCTATTCTGTGGCACGAGATGTGGCATGAAGGCCTGG |
| | AAGAGGCCTCCAGACTGTACTTCGGCGAGAGAAACGTGAAGGGCATGTTCGAGGT |
| | GCTGGAACCCCTGCATGCCATGATGGAAAGAGGCCCTCAGACACTGAAAGAGACA |
| | AGCTTCAACCAGGCCTACGGCCGGGATCTGATGGAAGCCCAAGAGTGGTGCCGGA |
| | AGTACATGAAGTCCGGCAATGTGAAGGACCTCCTGCAGGCATGGGACCTGTACTA |
| | CCACGTGTTCCGGQGGATCTCTAAGGGCAAAGACACAATCCCTTGGCTGGGCCAT |
| | CTGCTCGTTGGACTGTCTGGCGCCTTCGGCTTCATCATCCTGGTGTACCTGCTGA |
| | TCAACTGTCGGAACACAGGCCCATGGCTGAAGAAAGTGCTGAAGTGCAACACCCC |
| | TGATCCGAGCAAGTTCTTTAGCCAGCTGTCCAGCGAGCACGGCGGAGATGTTCAG |
| | AAGTGGCTGAGCAGCCCATTTCCTAGCAGCAGCTTTAGCCCTGGCGGACTGGCTC |
| | CTGAGATCAGCCCACTGGAAGTGCTGGAAAGGGACAAAGTGACCCAGCTGCTCCT |
| | GCAACAGGACAAGGTGCCAGAACCTGCCAGCCTGTCTCTGAACACCGATGCCTAT |
| | CTGTCCCTGCAAGAGCTGCAAGGATCCGGCGCCACCAACTTTAGTCTGCTCAAGC |
| | AAGCCGGGGACGTCGAGGAAAATCCTGGGCCAATGGGATCAAGACTGCTGTGCTG |
| | GGTGCTGCTGTGCCTGCTGGGAGCCGGACCTGTGAAAGCCGGGGTGACTCAGACT |
| | CCACGATACCTGATCAAGACCAGGGGCCAGCAGGTGACACTGTCTTGCAGCCCAA |
| | TCTCCGGACACCGCTCCGTGTCTTGGTACCAGCAGACCCCTGGACAGGGACTGCA |
| | GTTCCTGTTTGAGTATTTCTCTGAGACACAGCGGAACAAGGGCAATTTCCCCGGC |
| | CGGTTTAGCGGCAGACAGTTTAGCAACTCCAGGTCTGAGATGAATGTGAGCACCC |
| | TGGAGCTGGGCGACTCCGCCCTGTACCTGTGCGCAAGCTCCCTGGCCCTGGGACA |
| | GGGGAATCAGCAGTTTTTCGGACCCGGAACAAGGCTGACCGTGCTGGAGGATCTA |
| | CGTAACGTGACACCACCCAAAGTCTCACTGTTTGAGCCTAGCAAGGCAGAAATTG |
| | CCAACAAGCAGAAGGCCACCCTGGTGTGCCTGGCAAGAGGGTTCTTTCCAGATCA |
| | CGTGGAGCTGTCCTGGTGGGTCAACGGCAAAGAAGTGCATTCTGGGGTCTGCACC |
| | GACCCCCAGGCTTACAAGGAGAGTAATTACTCATATTGTCTGTCAAGCCGGCTGA |
| | GAGTGTCCGCCACATTCTGGCACAACCCTAGGAATCATTTCCGCTGCCAGGTCCA |
| | GTTTCACGGCCTGAGTGAGGAAGATAAATGGCCAGAGGGGTCACCTAAGCCAGTG |
| | ACACAGAACATCAGCGCAGAAGCCTGGGGACGAGCAGACTGTGGCATTACTAGCG |
| | CCTCCTATCATCAGGGCGTGCTGAGCGCCACTATCCTGTACGAGATTCTGCTGGG |
| | AAAGGCCACCCTGTATGCTGTGCTGGTCTCCGGCCTGGTGCTGATGGCCATGGTC |
| | AAGAAAAAGAACTCTGGGAGTGGAGCCACAAATTTCTCTCTGCTGAAACAGGCTG |
| | GAGATGTGGAGGAAAACCCCGGCCCTATGAAGAGCCTGCGCGTGCTGCTGGTCAT |
| | CCTGTGGCTGCAATTGAGTTGGGTGTGGAGCCAGAAGGACCAGGTGTTTCAGCCT |
| | AGCACTGTCGCATCATCAGAGGGGGCCGTCGTGGAAATCTTTTGTAATCACAGCG |
| | TGTCCAACGCCTACAATTTCTTTTGGTATCTGCACTTCCCAGGATGCGCACCTAG |
| | GCTGCTGGTGAAGGGCTCTAAGCCCAGCCAGCAGGGCCGGTACAACATGACCTAT |
| | GAGCGGTTCAGCTCCTCTCTGCTGATCCTGCAGGTGCGGGAGGCAGACGCAGCCG |
| | TGTACTATTGTGCCGTGGAGGATCTGAATCAGGCCGGCACAGCCCTGATTTTCGG |
| | CAAAGGAACAACCCTGAGCGTGAGCAGCATCCAGAACCCTGACCCAGCCGTATAC |
| | CAGCTGAGAGACTCTAAATCCAGTGACAAGTCTGTCTGCCTATTCACCGATTTTG |
| | ATTCTCAAACAAATGTGTCACAAAGTAAGGATTCTGATGTGTATATCACAGACAA |
| | AACTGTGCTAGACATGAGGTCTATGGACTTCAAGAGCAACAGTGCTGTGGCCTGG |
| | AGCAACAAATCTGACTTTGCATGTGCAAACGCCTTCAACAACAGCATTATTCCAG |
| | AAGACACCTTCTTCCCCAGCCCAGGTAAGGGCAGCTTTGGTGCCTTCGCAGGCTG |
| | TTTCCTTGCTTCAGGAATGGATCCTACGTAGATAAGTAGCATGGGGGGTTAATCA |
| | TTAACTACAAGGAACCCCTAGTGATGGAGTTGGCCACTCCCTCTCTGCGCGCTCG |
| | CTCGCTCACTGAGGCCGGGCGACCAAAGGTCGCCCGACGCCCGGGCTTTGCCCGG |
| | GCGGCCTCAGTGAGCGAGCGAGCGCGCCAGCTGGCGTAATAGCGAAGAGGCCCGC |
| | ACCGATCGCCCTTCCCAACAGTTGCGCAGCCTGAATGGCGAATGGCGATTCCGTT |
| | GCAATGGCTGGCGGTAATATTGTTCTGGATATTACCAGCAAGGCCGATAGTTTGA |
| | GTTCTTCTACTCAGGCAAGTGATGTTATTACTAATCAAAGAAGTATTGCGACAAC |
| | GGTTAATTTGCGTGATGGACAGACTCTTTTACTCGGTGGCCTCACTGATTATAAA |
| | AACACTTCTCAGGATTCTGGCGTACCGTTCCTGTCTAAAATCCCTTTAATCGGCC |
| | TCCTGTTTAGCTCCCGCTCTGATTCTAACGAGGAAAGCACGTTATACGTGCTCGT |
| | CAAAGCAACCATAGTACGCGCCCTGTAGCGGCGCATTAAGCGCGGCGGGTGTGGT |
| | GGTTACGCGCAGCGTGACCGCTACACTTGCCAGCGCCCTAGCGCCCGCTCCTTTC |
| | GCTTTCTTCCCTTCCTTTCTCGCCACGTTCGCCGGCTTTCCCCGTCAAGCTCTAA |
| | ATCGGGGGCTCCCTTTAGGGTTCCGATTTAGTGCTTTACGGCACCTCGACCCCAA |
| | AAAACTTGATTAGGGTGATGGTTCACGTAGTGGGCCATCGCCCTGATAGACGGTT |
| | TTTCGCCCTTTGACGTTGGAGTCCACGTTCTTTAATAGTGGACTCTTGTTCCAAA |
| | CTGGAACAACACTCAACCCTATCTCGGTCTATTCTTTTGATTTATAAGGGATTTT |
| | GCCGATTTCGGCCTATTGGTTAAAAAATGAGCTGATTTAACAAAAATTTAACGCG |
| | AATTTTAACAAAATATTAACGTTTACAATTTAAATATTTGCTTATACAATCTTCC |
| | TGTTTTTGGGGCTTTTCTGATTATCAACCGGGGTACATATGATTGACATGCTAGT |
| | TTTACGATTACCGTTCATCGATTCTCTTGTTTGCTCCAGACTCTCAGGCAATGAC |
| | CTGATAGCCTTTGTAGAGACCTCTCAAAAATAGCTACCCTCTCCGGCATGAATTT |
| | ATCAGCTAGAACGGTTGAATATCATATTGATGGTGATTTGACTGTCTCCGGCCTT |
| | TCTCACCCGTTTGAATCTTTACCTACACATTACTCAGGCATTGCATTTAAAATAT |
| | ATGAGGGTTCTAAAAATTTTTATCCTTGCGTTGAAATAAAGGCTTCTCCCGCAAA |
| | AGTATTACAGGGTCATAATGTTTTTGGTACAACCGATTTAGCTTTATGCTCTGAG |
| | GCTTTATTGCTTAATTTTGCTAATTCTTTGCCTTGCCTGTATGATTTATTGGATG |
| | TTGGAATCGCCTGATGCGGTATTTTCTCCTTACGCATCTGTGCGGTATTTCACAC |
| | CGCATATGGTGCACTCTCAGTACAATCTGCTCTGATGCCGCATAGTTAAGCCAGC |
| | CCCGACACCCGCCAACACCCGCTGACGCGCCCTGACGGGCTTGTCTGCTCCCGGC |
| | ATCCGCTTACAGACAAGCTGTGACCGTCTCCGGGAGCTGCATGTGTCAGAGGTTT |
| | TCACCGTCATCACCGAAACGCGCGAGACGAAAGGGCCTCGTGATACGCCTATTTT |
| | TATAGGTTAATGTCATGATAATAATGGTTTCTTAGACGTCAGGTGGCACTTTTCG |
| | GGGAAATGTGCGCGGAACCCCTATTTGTTTATTTTTCTAAATACATTCAAATATG |
| | TATCCGCTCATGAGACAATAACCCTGATAAATGCTTCAATAATATTGAAAAAGGA |
| | AGAGTATGAGTATTCAACATTTCCGTGTCGCCCTTATTCCCTTTTTTGCGGCATT |
| | TTGCCTTCCTGTTTTTGCTCACCCAGAAACGCTGGTGAAAGTAAAAGATGCTGAA |
| | GATCAGTTGGGTGCACGAGTGGGTTACATCGAACTGGATCTCAACAGCGGTAAGA |
| | TCCTTGAGAGTTTTCGCCCCGAAGAACGTTTTCCAATGATGAGCACTTTTAAAGT |
| | TCTGCTATGTGGCGCGGTATTATCCCGTATTGACGCCGGGCAAGAGCAACTCGGT |
| | CGCCGCATACACTATTCTCAGAATGACTTGGTTGAGTACTCACCAGTCACAGAAA |
| | AGCATCTTACGGATGGCATGACAGTAAGAGAATTATGCAGTGCTGCCATAACCAT |
| | GAGTGATAACACTGCGGCCAACTTACTTCTGACAACGATCGGAGGACCGAAGGAG |
| | CTAACCGCTTTTTTGCACAACATGGGGGATCATGTAACTCGCCTTGATCGTTGGG |
| | AACCGGAGCTGAATGAAGCCATACCAAACGACGAGCGTGACACCACGATGCCTGT |
| | AGCAATGGCAACAACGTTGCGCAAACTATTAACTGGCGAACTACTTACTCTAGCT |
| | TCCCGGCAACAATTAATAGACTGGATGGAGGCGGATAAAGTTGCAGGACCACTTC |
| | TGCGCTCGGCCCTTCCGGCTGGCTGGTTTATTGCTGATAAATCTGGAGCCGGTGA |
| | GCGTGGGTCTCGCGGTATCATTGCAGCACTGGGGCCAGATGGTAAGCCCTCCCGT |
| | ATCGTAGTTATCTACACGACGGGGAGTCAGGCAACTATGGATGAACGAAATAGAC |
| | AGATCGCTGAGATAGGTGCCTCACTGATTAAGCATTGGTAACTGTCAGACCAAGT |
| | TTACTCATATATACTTTAGATTGATTTAAAACTTCATTTTTAATTTAAAAGGATC |
| | TAGGTGAAGATCCTTTTTGATAATCTCATGACCAAAATCCCTTAACGTGAGTTTT |
| | CGTTCCACTGAGCGTCAGACCCC |
| Construct | AGCTTAATGTAGTCTTATGCAATACTCTTGTAGTCTTGCAACATGGTAACGATGA |
| 3312 | GTTAGCAACATGCCTTACAAGGAGAGAAAAAGCACCGTGCATGCCGATTGGTGGA |
| SEQ ID | AGTAAGGTGGTACGATCGTGCCTTATTAGGAAGGCAACAGACGGGTCTGACATGG |
| NO: 1445 | ATTGGACGAACCACTGAATTGCCGCATTGCAGAGATATTGTATTTAAGTGCCTAG |
| | CTCGATACAATAAACGGGTCTCTCTGGTTAGACCAGATCTGAGCCTGGGAGCTCT |
| | CTGGCTAACTAGGGAACCCACTGCTTAAGCCTCAATAAAGCTTGCCTTGAGTGCT |
| | TCAAGTAGTGTGTGCCCGTCTGTTGTGTGACTCTGGTAACTAGAGATCCCTCAGA |
| | CCCTTTTAGTCAGTGTGGAAAATCTCTAGCAGTGGCGCCCGAACAGGGACTTGAA |
| | AGCGAAAGGGAAACCAGAGGAGCTCTCTCGACGCAGGACTCGGCTTGCTGAAGCG |
| | CGCACGGCAAGAGGCGAGGGGCGGCGACTGGTGAGTACGCCAAAAATTTTGACTA |
| | GCGGAGGCTAGAAGGAGAGAGATGGGTGCGAGAGCGTCAGTATTAAGCGGGGGAG |
| | AATTAGATCGCGATGGGAAAAAATTCGGTTAAGGCCAGGGGGAAAGAAAAAATAT |
| | AAATTAAAACATATAGTATGGGCAAGCAGGGAGCTAGAACGATTCGCAGTTAATC |
| | CTGGCCTGTTAGAAACATCAGAAGGCTGTAGACAAATACTGGGACAGCTACAACC |
| | ATCCCTTCAGACAGGATCAGAAGAACTTAGATCATTATATAATACAGTAGCAACC |
| | CTCTATTGTGTGCATCAAAGGATAGAGATAAAAGACACCAAGGAAGCTTTAGACA |
| | AGATAGAGGAAGAGCAAAACAAAAGTAAGACCACCGCACAGCAAGCGGCCGCTGA |
| | TCTTCAGACCTGGAGGAGGAGATATGAGGGACAATTGGAGAAGTGAATTATATAA |
| | ATATAAAGTAGTAAAAATTGAACCATTAGGAGTAGCACCCACCAAGGCAAAGAGA |
| | AGAGTGGTGCAGAGAGAAAAAAGAGCAGTGGGAATAGGAGCTTTGTTCCTTGGGT |
| | TCTTGGGAGCAGCAGGAAGCACTATGGGCGCAGCCTCAATGACGCTGACGGTACA |
| | GGCCAGACAATTATTGTCTGGTATAGTGCAGCAGCAGAACAATTTGCTGAGGGCT |
| | ATTGAGGCGCAACAGCATCTGTTGCAACTCACAGTCTGGGGCATCAAGCAGCTCC |
| | AGGCAAGAATCCTGGCTGTGGAAAGATACCTAAAGGATCAACAGCTCCTGGGGAT |
| | TTGGGGTTGCTCTGGAAAACTCATTTGCACCACTGCTGTGCCTTGGAATGCTAGT |
| | TGGAGTAATAAATCTCTGGAACAGATTTGGAATCACACGACCTGGATGGAGTGGG |
| | ACAGAGAAATTAACAATTACACAAGCTTAATACACTCCTTAATTGAAGAATCGCA |
| | AAACCAGCAAGAAAAGAATGAACAAGAATTATTGGAATTAGATAAATGGGCAAGT |
| | TTGTGGAATTGGTTTAACATAACAAATTGGCTGTGGTATATAAAATTATTCATAA |
| | TGATAGTAGGAGGCTTGGTAGGTTTAAGAATAGTTTTTGCTGTACTTTCTATAGT |
| | GAATAGAGTTAGGCAGGGATATTCACCATTATCGTTTCAGACCCACCTCCCAACC |
| | CCGAGGGGACCCGACAGGCCCGAAGGAATAGAAGAAGAAGGTGGAGAGAGAGACA |
| | GAGACAGATCCATTCGATTAGTGAACGGATCTCGACGGTATCGGTTAACTTTTAA |
| | AAGAAAAGGGGGGATTGGGGGGTACAGTGCAGGGGAAAGAATAGTAGACATAATA |
| | GCAACAGACATACAAACTAAAGAATTACAAAAACAAATTACAAAAATTCAAAATT |
| | TTATCGATCACGAGACTAGCCTCGAGAAGCTTGATATCGAATTCCCACGGGGTTG |
| | GACGCGTAGAGGCTCCGGTGCCCGTCAGTGGGCAGAGCGCACATCGCCCACAGTC |
| | CCCGAGAAGTTGGGGGGAGGGGTCGGCAATTGAACCGGTGCCTAGAGAAGGTGGC |
| | GCGGGGTAAACTGGGAAAGTGATGTCGTGTACTGGCTCCGCCTTTTTCCCGAGGG |
| | TGGGGGAGAACCGTATATAAGTGCAGTAGTCGCCGTGAACGTTCTTTTTCGCAAC |
| | GGGTTTGCCGCCAGAACACAGCTAGCACCGGTGCCGCCACCATGCCTCTGGGCCT |
| | GCTGTGGCTGGGCCTGGCCCTGCTGGGCGCCCTGCACGCCCAGGCCGGCGTGCAG |
| | GTGGAGACAATCTCCCCAGGCGACGGACGCACATTCCCTAAGCGGGGCCAGACCT |
| | GCGTGGTGCACTATACAGGCATGCTGGAGGATGGCAAGAAGTTTGACAGCTCCCG |
| | GGATAGAAACAAGCCATTCAAGTTTATGCTGGGCAAGCAGGAAGTGATCAGAGGC |
| | TGGGAGGAGGGCGTGGCCCAGATGTCTGTGGGCCAGAGGGCCAAGCTGACCATCA |
| | GCCCAGACTACGCCTATGGAGCAACAGGCCACCCAGGAATCATCCCACCTCACGC |
| | CACCCTGGTGTTCGATGTGGAGCTGCTGAAGCTGGGCGAGGGATCCAACACATCA |
| | AAAGAGAACCCCTTTCTGTTCGCATTGGAGGCCGTAGTCATATCTGTTGGATCCA |
| | TGGGACTTATTATCTCCCTGTTGTGTGTGTACTTCTGGCTGGAACGGACTATGCC |
| | CAGGATCCCCACGCTCAAGAATCTGGAAGATCTCGTCACAGAATACCATGGTAAT |
| | TTCAGCGCCTGGAGCGGAGTCTCTAAGGGTCTGGCCGAATCCCTCCAACCCGATT |
| | ATTCTGAACGGTTGTGCCTCGTATCCGAAATACCACCAAAAGGCGGGGCTCTGGG |
| | TGAGGGCCCAGGGGCGAGTCCGTGCAATCAACACAGCCCGTATTGGGCCCCTCCT |
| | TGTTATACGTTGAAGCCCGAAACTGGAAGCGGAGCTACTAACTTCAGCCTGCTGA |
| | AGCAGGCTGGAGACGTGGAGGAGAACCCTGGACCTATGGCACTGCCCGTGACCGC |
| | CCTGCTGCTGCCTCTGGCCCTGCTGCTGCACGCAGCCCGGCCTATCCTGTGGCAC |
| | GAGATGTGGCACGAGGGCCTGGAGGAGGCCAGCAGGCTGTATTTTGGCGAGCGCA |
| | ACGTGAAGGGCATGTTCGAGGTGCTGGAGCCTCTGCACGCCATGATGGAGAGAGG |
| | CCCACAGACCCTGAAGGAGACATCCTTTAACCAGGCCTATGGACGGGACCTGATG |
| | GAGGCACAGGAGTGGTGCAGAAAGTACATGAAGTCTGGCAATGTGAAGGACCTGC |
| | TGCAGGCCTGGGATCTGTACTATCACGTGTTTCGGAGAATCTCCAAGGGCAAAGA |
| | CACGATTCCGTGGCTTGGGCATCTGCTCGTTGGGCTGAGTGGTGCGTTTGGTTTC |
| | ATCATCTTGGTCTATCTCTTGATCAATTGCAGAAATACAGGCCCTTGGCTGAAAA |
| | AAGTGCTCAAGTGTAATACCCCCGACCCAAGCAAGTTCTTCTCCCAGCTTTCTTC |
| | AGAGCATGGAGGCGATGTGCAGAAATGGCTCTCTTCACCTTTTCCCTCCTCAAGC |
| | TTCTCCCCGGGAGGGCTGGCGCCCGAGATTTCACCTCTTGAGGTACTTGAACGAG |
| | ACAAGGTTACCCAACTTCTCCTTCAACAGGATAAGGTACCCGAACCTGCGAGCCT |
| | TAGCTCCAACCACTCTCTTACGAGCTGCTTCACCAATCAGGGATACTTCTTTTTC |
| | CACCTTCCCGATGCGCTGGAAATCGAAGCTTGTCAAGTTTACTTTACCTATGATC |
| | CATATAGCGAGGAAGATCCCGACGAAGGAGTCGCCGGTGCGCCCACGGGTTCCTC |
| | ACCCCAACCTCTCCAGCCTCTCTCAGGAGAAGATGATGCTTATTGCACTTTTCCC |
| | AGTAGAGACGATCTCCTCCTCTTTTCTCCATCTCTTTTGGGGGGACCTTCCCCCC |
| | CTTCTACGGCACCTGGCGGGTCTGGTGCTGGCGAGGAGCGGATGCCGCCGTCCCT |
| | CCAGGAGCGAGTACCACGAGATTGGGATCCCCAGCCACTTGGACCCCCCACCCCC |
| | GGCGTACCTGACCTTGTCGATTTTCAACCTCCCCCTGAATTGGTGCTGCGAGAGG |
| | CTGGGGAGGAAGTTCCGGACGCTGGGCCGAGGGAGGGCGTGTCCTTTCCATGGAG |
| | TAGGCCTCCAGGTCAAGGCGAGTTTAGGGCTCTCAACGCGCGGCTGCCGTTGAAT |
| | ACAGACGCTTATCTCTCACTGCAGGAACTGCAAGGTCAGGACCCAACACATCTTG |
| | TAGGATCTGGTGCTACTAATTTTTCTCTTTTGAAGCAAGCTGGAGATGTTGAAGA |
| | GAACCCCGGTCCGGTGAGCAAGGGCGAGGAGGATAACATGGCCATCATCAAGGAG |
| | TTCATGCGCTTCAAGGTGCACATGGAGGGCTCCGTGAACGGCCACGAGTTCGAGA |
| | TCGAGGGCGAGGGCGAGGGCCGCCCCTACGAGGGCACCCAGACCGCCAAGCTGAA |
| | GGTGACCAAGGGTGGCCCCCTGCCCTTCGCCTGGGACATCCTGTCCCCTCAGTTC |
| | ATGTACGGCTCCAAGGCCTACGTGAAGCACCCCGCCGACATCCCCGACTACTTGA |
| | AGCTGTCCTTCCCCGAGGGCTTCAAGTGGGAGCGCGTGATGAACTTCGAGGACGG |
| | CGGCGTGGTGACCGTGACCCAGGACTCCTCTCTGCAGGACGGCGAGTTCATCTAC |
| | AAGGTGAAGCTGCGCGGCACCAACTTCCCCTCCGACGGCCCCGTAATGCAGAAGA |
| | AGACCATGGGCTGGGAGGCCTCCTCCGAGCGGATGTACCCCGAGGACGGCGCCCT |
| | GAAGGGCGAGATCAAGCAGAGGCTGAAGCTGAAGGACGGCGGCCACTACGACGCT |
| | GAGGTCAAGACCACCTACAAGGCCAAGAAGCCCGTGCAGCTGCCCGGCGCCTACA |
| | ACGTCAACATCAAGTTGGACATCACCTCCCACAACGAGGACTACACCATCGTGGA |
| | ACAGTACGAACGCGCCGAGGGCCGCCACTCCACCGGCGGCATGGACGAGCTGTAC |
| | AAGTGAACTAGTGTCGACAATCAACCTCTGGATTACAAAATTTGTGAAAGATTGA |
| | CTGGTATTCTTAACTATGTTGCTCCTTTTACGCTATGTGGATACGCTGCTTTAAT |
| | GCCTTTGTATCATGCTATTGCTTCCCGTATGGCTTTCATTTTCTCCTCCTTGTAT |
| | AAATCCTGGTTGCTGTCTCTTTATGAGGAGTTGTGGCCCGTTGTCAGGCAACGTG |
| | GCGTGGTGTGCACTGTGTTTGCTGACGCAACCCCCACTGGTTGGGGCATTGCCAC |
| | CACCTGTCAGCTCCTTTCCGGGACTTTCGCTTTCCCCCTCCCTATTGCCACGGCG |
| | GAACTCATCGCCGCCTGCCTTGCCCGCTGCTGGACAGGGGCTCGGCTGTTGGGCA |
| | CTGACAATTCCGTGGTGTTGTCGGGGAAGCTGACGTCCTTTCCATGGCTGCTCGC |
| | CTGTGTTGCCACCTGGATTCTGCGCGGGACGTCCTTCTGCTACGTCCCTTCGGCC |
| | CTCAATCCAGCGGACCTTCCTTCCCGCGGCCTGCTGCCGGCTCTGCGGCCTCTTC |
| | CGCGTCTTCGCCTTCGCCCTCAGACGAGTCGGATCTCCCTTTGGGCCGCCTCCCC |
| | GCCTGGAATTCGAGCTCGGTACCTTTAAGACCAATGACTTACAAGGCAGCTGTAG |
| | ATCTTAGCCACTTTTTAAAAGAAAAGGGGGGACTGGAAGGGCTAATTCACTCCCA |
| | ACGAAGACAAGATCTGCTTTTTGCTTGTACTGGGTCTCTCTGGTTAGACCAGATC |
| | TGAGCCTGGGAGCTCTCTGGCTAACTAGGGAACCCACTGCTTAAGCCTCAATAAA |
| | GCTTGCCTTGAGTGCTTCAAGTAGTGTGTGCCCGTCTGTTGTGTGACTCTGGTAA |
| | CTAGAGATCCCTCAGACCCTTTTAGTCAGTGTGGAAAATCTCTAGCAGTAGTAGT |
| | TCATGTCATCTTATTATTCAGTATTTATAACTTGCAAAGAAATGAATATCAGAGA |
| | GTGAGAGGAACTTGTTTATTGCAGCTTATAATGGTTACAAATAAAGCAATAGCAT |
| | CACAAATTTCACAAATAAAGCATTTTTTTCACTGCATTCTAGTTGTGGTTTGTCC |
| | AAACTCATCAATGTATCTTATCATGTCTGGCTCTAGCTATCCCGCCCCTAACTCC |
| | GCCCAGTTCCGCCCATTCTCCGCCCCATGGCTGACTAATTTTTTTTATTTATGCA |
| | GAGGCCGAGGCCGCCTCGGCCTCTGAGCTATTCCAGAAGTAGTGAGGAGGCTTTT |
| | TTGGAGGCCTAGGCTTTTGCGTCGAGACGTACCCAATTCGCCCTATAGTGAGTCG |
| | TATTACGCGCGCTCACTGGCCGTCGTTTTACAACGTCGTGACTGGGAAAACCCTG |
| | GCGTTACCCAACTTAATCGCCTTGCAGCACATCCCCCTTTCGCCAGCTGGCGTAA |
| | TAGCGAAGAGGCCCGCACCGATCGCCCTTCCCAACAGTTGCGCAGCCTGAATGGC |
| | GAATGGCGCGACGCGCCCTGTAGCGGCGCATTAAGCGCGGCGGGTGTGGTGGTTA |
| | CGCGCAGCGTGACCGCTACACTTGCCAGCGCCCTAGCGCCCGCTCCTTTCGCTTT |
| | CTTCCCTTCCTTTCTCGCCACGTTCGCCGGCTTTCCCCGTCAAGCTCTAAATCGG |
| | GGGCTCCCTTTAGGGTTCCGATTTAGTGCTTTACGGCACCTCGACCCCAAAAAAC |
| | TTGATTAGGGTGATGGTTCACGTAGTGGGCCATCGCCCTGATAGACGGTTTTTCG |
| | CCCTTTGACGTTGGAGTCCACGTTCTTTAATAGTGGACTCTTGTTCCAAACTGGA |
| | ACAACACTCAACCCTATCTCGGTCTATTCTTTTGATTTATAAGGGATTTTGCCGA |
| | TTTCGGCCTATTGGTTAAAAAATGAGCTGATTTAACAAAAATTTAACGCGAATTT |
| | TAACAAAATATTAACGTTTACAATTTCCCAGGTGGCACTTTTCGGGGAAATGTGC |
| | GCGGAACCCCTATTTGTTTATTTTTCTAAATACATTCAAATATGTATCCGCTCAT |
| | GAGACAATAACCCTGATAAATGCTTCAATAATATTGAAAAAGGAAGAGTATGAGT |
| | ATTCAACATTTCCGTGTCGCCCTTATTCCCTTTTTTGCGGCATTTTGCCTTCCTG |
| | TTTTTGCTCACCCAGAAACGCTGGTGAAAGTAAAAGATGCTGAAGATCAGTTGGG |
| | TGCACGAGTGGGTTACATCGAACTGGATCTCAACAGCGGTAAGATCCTTGAGAGT |
| | TTTCGCCCCGAAGAACGTTTTCCAATGATGAGCACTTTTAAAGTTCTGCTATGTG |
| | GCGCGGTATTATCCCGTATTGACGCCGGGCAAGAGCAACTCGGTCGCCGCATACA |
| | CTATTCTCAGAATGACTTGGTTGAGTACTCACCAGTCACAGAAAAGCATCTTACG |
| | GATGGCATGACAGTAAGAGAATTATGCAGTGCTGCCATAACCATGAGTGATAACA |
| | CTGCGGCCAACTTACTTCTGACAACGATCGGAGGACCGAAGGAGCTAACCGCTTT |
| | TTTGCACAACATGGGGGATCATGTAACTCGCCTTGATCGTTGGGAACCGGAGCTG |
| | AATGAAGCCATACCAAACGACGAGCGTGACACCACGATGCCTGTAGCAATGGCAA |
| | CAACGTTGCGCAAACTATTAACTGGCGAACTACTTACTCTAGCTTCCCGGCAACA |
| | ATTAATAGACTGGATGGAGGCGGATAAAGTTGCAGGACCACTTCTGCGCTCGGCC |
| | CTTCCGGCTGGCTGGTTTATTGCTGATAAATCTGGAGCCGGTGAGCGTGGGTCTC |
| | GCGGTATCATTGCAGCACTGGGGCCAGATGGTAAGCCCTCCCGTATCGTAGTTAT |
| | CTACACGACGGGGAGTCAGGCAACTATGGATGAACGAAATAGACAGATCGCTGAG |
| | ATAGGTGCCTCACTGATTAAGCATTGGTAACTGTCAGACCAAGTTTACTCATATA |
| | TACTTTAGATTGATTTAAAACTTCATTTTTAATTTAAAAGGATCTAGGTGAAGAT |
| | CCTTTTTGATAATCTCATGACCAAAATCCCTTAACGTGAGTTTTCGTTCCACTGA |
| | GCGTCAGACCCCGTAGAAAAGATCAAAGGATCTTCTTGAGATCCTTTTTTTCTGC |
| | GCGTAATCTGCTGCTTGCAAACAAAAAAACCACCGCTACCAGCGGTGGTTTGTTT |
| | GCCGGATCAAGAGCTACCAACTCTTTTTCCGAAGGTAACTGGCTTCAGCAGAGCG |
| | CAGATACCAAATACTGTCCTTCTAGTGTAGCCGTAGTTAGGCCACCACTTCAAGA |
| | ACTCTGTAGCACCGCCTACATACCTCGCTCTGCTAATCCTGTTACCAGTGGCTGC |
| | TGCCAGTGGCGATAAGTCGTGTCTTACCGGGTTGGACTCAAGACGATAGTTACCG |
| | GATAAGGCGCAGCGGTCGGGCTGAACGGGGGGTTCGTGCACACAGCCCAGCTTGG |
| | AGCGAACGACCTACACCGAACTGAGATACCTACAGCGTGAGCTATGAGAAAGCGC |
| | CACGCTTCCCGAAGGGAGAAAGGCGGACAGGTATCCGGTAAGCGGCAGGGTCGGA |
| | ACAGGAGAGCGCACGAGGGAGCTTCCAGGGGGAAACGCCTGGTATCTTTATAGTC |
| | CTGTCGGGTTTCGCCACCTCTGACTTGAGCGTCGATTTTTGTGATGCTCGTCAGG |
| | GGGGCGGAGCCTATGGAAAAACGCCAGCAACGCGGCCTTTTTACGGTTCCTGGCC |
| | TTTTGCTGGCCTTTTGCTCACATGTTCTTTCCTGCGTTATCCCCTGATTCTGTGG |
| | ATAACCGTATTACCGCCTTTGAGTGAGCTGATACCGCTCGCCGCAGCCGAACGAC |
| | CGAGCGCAGCGAGTCAGTGAGCGAGGAAGCGGAAGAGCGCCCAATACGCAAACCG |
| | CCTCTCCCCGCGCGTTGGCCGATTCATTAATGCAGCTGGCACGACAGGTTTCCCG |
| | ACTGGAAAGCGGGCAGTGAGCGCAACGCAATTAATGTGAGTTAGCTCACTCATTA |
| | GGCACCCCAGGCTTTACACTTTATGCTTCCGGCTCGTATGTTGTGTGGAATTGTG |
| | AGCGGATAACAATTTCACACAGGAAACAGCTATGACCATGATTACGCCAAGCGCG |
| | CAATTAACCCTCACTAAAGGGAACAAAAGCTGGAGCTGCA |
| Construct | GTAGAAAAGATCAAAGGATCTTCTTGAGATCCTTTTTTTCTGCGCGTAATCTGCT |
| 3354 | GCTTGCAAACAAAAAAACCACCGCTACCAGCGGTGGTTTGTTTGCCGGATCAAGA |
| SEQ ID | GCTACCAACTCTTTTTCCGAAGGTAACTGGCTTCAGCAGAGCGCAGATACCAAAT |
| NO: 1446 | ACTGTCCTTCTAGTGTAGCCGTAGTTAGGCCACCACTTCAAGAACTCTGTAGCAC |
| | CGCCTACATACCTCGCTCTGCTAATCCTGTTACCAGTGGCTGCTGCCAGTGGCGA |
| | TAAGTCGTGTCTTACCGGGTTGGACTCAAGACGATAGTTACCGGATAAGGCGCAG |
| | CGGTCGGGCTGAACGGGGGGTTCGTGCACACAGCCCAGCTTGGAGCGAACGACCT |
| | ACACCGAACTGAGATACCTACAGCGTGAGCTATGAGAAAGCGCCACGCTTCCCGA |
| | AGGGAGAAAGGCGGACAGGTATCCGGTAAGCGGCAGGGTCGGAACAGGAGAGCGC |
| | ACGAGGGAGCTTCCAGGGGGAAACGCCTGGTATCTTTATAGTCCTGTCGGGTTTC |
| | GCCACCTCTGACTTGAGCGTCGATTTTTGTGATGCTCGTCAGGGGGGCGGAGCCT |
| | ATGGAAAAACGCCAGCAACGCGGCCTTTTTACGGTTCCTGGCCTTTTGCTGGCCT |
| | TTTGCTCACATGTTCTTTCCTGCGTTATCCCCTGATTCTGTGGATAACCGTATTA |
| | CCGCCTTTGAGTGAGCTGATACCGCTCGCCGCAGCCGAACGACCGAGCGCAGCGA |
| | GTCAGTGAGCGAGGAAGCGGAAGAGCGCCCAATACGCAAACCGCCTCTCCCCGCG |
| | CGTTGGCCGATTCATTAATGCAGCTGCGCGCTCGCTCGCTCACTGAGGCCGCCCG |
| | GGCAAAGCCCGGGCGTCGGGCGACCTTTGGTCGCCCGGCCTCAGTGAGCGAGCGA |
| | GCGCGCAGAGAGGGAGTGGCCAACTCCATCACTAGGGGTTCCTTGTAGTTAATGA |
| | TTAACCCGCCATGCTACTTATCTACGTACCCTATTAAATAAAAGAATAAGCAGTA |
| | TTATTAAGTAGCCCTGCATTTCAGGTTTCCTTGAGTGGCAGGCCAGGCCTGGCCG |
| | TGAACGTTCACTGAAATCATGGCCTCTTGGCCAAGATTGATAGCTTGTGCCTGTC |
| | CCTGAGTCCCAGTCCATCACGAGCAGCTGGTTTCTAAGATGCTATTTCCCGTATA |
| | AAGCATGAGACCGTGACTTGCCAGCCCCACAGAGCCCCGCCCTTGTCCATCACTG |
| | GCATCTGGACTCCAGCCTGGGTTGGGGCAAAGAGGGAAATGAGATCATGTCCTAC |
| | GCGTAGGAACAGAGAAACAGGAGAATATGGGCCAAACAGGATATCTGTGGTAAGC |
| | AGTTCCTGCCCCGGCTCAGGGCCAAGAACAGTTGGAACAGCAGAATATGGGCCAA |
| | ACAGGATATCTGTGGTAAGCAGTTCCTGCCCCGGCTCAGGGCCAAGAACAGATGG |
| | TCCCCAGATGCGGTCCCGCCCTCAGCAGTTTCTAGAGAACCATCAGATGTTTCCA |
| | GGGTGCCCCAAGGACCTGAAATGACCCTGTGCCTTATTTGAACTAACCAATCAGT |
| | TCGCTTCTCGCTTCTGTTCGCGCGCTTCTGCTCCCCGAGCTCTATATAAGCAGAG |
| | CTCGTTTAGTGAACCGTCAGATCGCCTGGAGACGCCATCCACGCTGTTTTGACTT |
| | CCATAGAAGGATCATGGCTCTGCCAGTGACAGCTCTGCTGCTTCCTCTGGCTCTG |
| | TTGCTGCATGCCGCCAGACCTATTCTGTGGCACGAGATGTGGCATGAAGGCCTGG |
| | AAGAGGCCTCCAGACTGTACTTCGGCGAGAGAAACGTGAAGGGCATGTTCGAGGT |
| | GCTGGAACCCCTGCATGCCATGATGGAAAGAGGCCCTCAGACACTGAAAGAGACA |
| | AGCTTCAACCAGGCCTACGGCCGGGATCTGATGGAAGCCCAAGAGTGGTGCCGGA |
| | AGTACATGAAGTCCGGCAATGTGAAGGACCTCCTGCAGGCATGGGACCTGTACTA |
| | CCACGTGTTCCGGCGGATCTCTAAGGGCAAAGACACGATTCCGTGGCTTGGGCAT |
| | CTGCTCGTTGGGCTGAGTGGTGCGTTTGGTTTCATCATCTTGGTCTATCTCTTGA |
| | TCAATTGCAGAAATACAGGCCCTTGGCTGAAAAAAGTGCTCAAGTGTAATACCCC |
| | CGACCCAAGCAAGTTCTTCTCCCAGCTTTCTTCAGAGCATGGAGGCGATGTGCAG |
| | AAATGGCTCTCTTCACCTTTTCCCTCCTCAAGTTTCTCCCCGGGAGGGCTGGCGC |
| | CCGAGATTTCACCTCTTGAGGTACTTGAACGAGACAAGGTTACCCAACTTCTCCT |
| | TCAACAGGATAAAGTACCCGAACCTGCGAGCCTTAGCTCCAACCACTCTCTTACG |
| | AGCTGCTTCACCAATCAGGGATACTTCTTTTTCCACCTTCCCGATGCGCTGGAAA |
| | TCGAAGCATGTCAAGTTTACTTTACCTATGATCCATATAGCGAGGAAGATCCCGA |
| | CGAAGGAGTCGCCGGTGCGCCCACGGGTTCCTCACCCCAACCTCTCCAGCCTCTC |
| | TCAGGAGAAGATGATGCTTATTGCACTTTTCCCAGTAGAGACGATCTCCTCCTCT |
| | TTTCTCCATCTCTTTTGGGGGGACCTTCCCCCCCTTCTACGGCACCTGGCGGGTC |
| | TGGTGCTGGCGAGGAGCGGATGCCGCCGTCCCTCCAGGAGCGAGTACCACGAGAT |
| | TGGGATCCCCAGCCACTTGGACCCCCCACCCCCGGCGTACCTGACCTTGTCGATT |
| | TTCAACCTCCCCCTGAATTGGTGCTGCGAGAGGCTGGGGAGGAAGTTCCGGACGC |
| | TGGGCCGAGGGAGGGCGTGTCCTTTCCATGGAGTAGGCCTCCAGGTCAAGGCGAG |
| | TTTAGGGCTCTCAACGCGCGGCTGCCGTTGAATACAGACGCTTATCTCTCACTGC |
| | AGGAACTGCAAGGTCAGGACCCAACACATCTTGTAGGATCCGGCGCCACCAACTT |
| | TAGTCTGCTCAAGCAAGCCGGGGACGTCGAGGAAAATCCTGGGCCAATGGGATCA |
| | AGACTGCTGTGCTGGGTGCTGCTGTGCCTGCTGGGAGCCGGACCTGTGAAAGCCG |
| | GGGTGACTCAGACTCCACGATACCTGATCAAGACCAGGGGCCAGCAGGTGACACT |
| | GTCTTGCAGCCCAATCTCCGGACACCGCTCCGTGTCTTGGTACCAGCAGACCCCT |
| | GGACAGGGACTGCAGTTCCTGTTTGAGTATTTCTCTGAGACACAGCGGAACAAGG |
| | GCAATTTCCCCGGCCGGTTTAGCGGCAGACAGTTTAGCAACTCCAGGTCTGAGAT |
| | GAATGTGAGCACCCTGGAGCTGGGCGACTCCGCCCTGTACCTGTGCGCAAGCTCC |
| | CTGGCCCTGGGACAGGGGAATCAGCAGTTTTTCGGACCCGGAACAAGGCTGACCG |
| | TGCTGGAGGATCTACGTAACGTGACACCACCCAAAGTCTCACTGTTTGAGCCTAG |
| | CAAGGCAGAAATTGCCAACAAGCAGAAGGCCACCCTGGTGTGCCTGGCAAGAGGG |
| | TTCTTTCCAGATCACGTGGAGCTGTCCTGGTGGGTCAACGGCAAAGAAGTGCATT |
| | CTGGGGTCTGCACCGACCCCCAGGCTTACAAGGAGAGTAATTACTCATATTGTCT |
| | GTCAAGCCGGCTGAGAGTGTCCGCCACATTCTGGCACAACCCTAGGAATCATTTC |
| | CGCTGCCAGGTCCAGTTTCACGGCCTGAGTGAGGAAGATAAATGGCCAGAGGGGT |
| | CACCTAAGCCAGTGACACAGAACATCAGCGCAGAAGCCTGGGGACGAGCAGACTG |
| | TGGCATTACTAGCGCCTCCTATCATCAGGGCGTGCTGAGCGCCACTATCCTGTAC |
| | GAGATTCTGCTGGGAAAGGCCACCCTGTATGCTGTGCTGGTCTCCGGCCTGGTGC |
| | TGATGGCCATGGTCAAGAAAAAGAACTCTGGGAGTGGAGCCACAAATTTCTCTCT |
| | GCTGAAACAGGCTGGAGATGTGGAGGAAAACCCCGGCCCTATGAAGAGCCTGCGC |
| | GTGCTGCTGGTCATCCTGTGGCTGCAATTGAGTTGGGTGTGGAGCCAGAAGGACC |
| | AGGTGTTTCAGCCTAGCACTGTCGCATCATCAGAGGGGGCCGTCGTGGAAATCTT |
| | TTGTAATCACAGCGTGTCCAACGCCTACAATTTCTTTTGGTATCTGCACTTCCCA |
| | GGATGCGCACCTAGGCTGCTGGTGAAGGGCTCTAAGCCCAGCCAGCAGGGCCGGT |
| | ACAACATGACCTATGAGCGGTTCAGCTCCTCTCTGCTGATCCTGCAGGTGCGGGA |
| | GGCAGACGCAGCCGTGTACTATTGTGCCGTGGAGGATCTGAATCAGGCCGGCACA |
| | GCCCTGATTTTCGGCAAAGGAACAACCCTGAGCGTGAGCAGCATCCAGAACCCTG |
| | ACCCAGCCGTATACCAGCTGAGAGACTCTAAATCCAGTGACAAGTCTGTCTGCCT |
| | ATTCACCGATTTTGATTCTCAAACAAATGTGTCACAAAGTAAGGATTCTGATGTG |
| | TATATCACAGACAAAACTGTGCTAGACATGAGGTCTATGGACTTCAAGAGCAACA |
| | GTGCTGTGGCCTGGAGCAACAAATCTGACTTTGCATGTGCAAACGCCTTCAACAA |
| | CAGCATTATTCCAGAAGACACCTTCTTCCCCAGCCCAGGTAAGGGCAGCTTTGGT |
| | GCCTTCGCAGGCTGTTTCCTTGCTTCAGGAATGGATCCTACGTAGATAAGTAGCA |
| | TGGGGGGTTAATCATTAACTACAAGGAACCCCTAGTGATGGAGTTGGCCACTCCC |
| | TCTCTGCGCGCTCGCTCGCTCACTGAGGCCGGGCGACCAAAGGTCGCCCGACGCC |
| | CGGGCTTTGCCCGGGCGGCCTCAGTGAGCGAGCGAGCGCGCCAGCTGGCGTAATA |
| | GCGAAGAGGCCCGCACCGATCGCCCTTCCCAACAGTTGCGCAGCCTGAATGGCGA |
| | ATGGCGATTCCGTTGCAATGGCTGGCGGTAATATTGTTCTGGATATTACCAGCAA |
| | GGCCGATAGTTTGAGTTCTTCTACTCAGGCAAGTGATGTTATTACTAATCAAAGA |
| | AGTATTGCGACAACGGTTAATTTGCGTGATGGACAGACTCTTTTACTCGGTGGCC |
| | TCACTGATTATAAAAACACTTCTCAGGATTCTGGCGTACCGTTCCTGTCTAAAAT |
| | CCCTTTAATCGGCCTCCTGTTTAGCTCCCGCTCTGATTCTAACGAGGAAAGCACG |
| | TTATACGTGCTCGTCAAAGCAACCATAGTACGCGCCCTGTAGCGGCGCATTAAGC |
| | GCGGCGGGTGTGGTGGTTACGCGCAGCGTGACCGCTACACTTGCCAGCGCCCTAG |
| | CGCCCGCTCCTTTCGCTTTCTTCCCTTCCTTTCTCGCCACGTTCGCCGGCTTTCC |
| | CCGTCAAGCTCTAAATCGGGGGCTCCCTTTAGGGTTCCGATTTAGTGCTTTACGG |
| | CACCTCGACCCCAAAAAACTTGATTAGGGTGATGGTTCACGTAGTGGGCCATCGC |
| | CCTGATAGACGGTTTTTCGCCCTTTGACGTTGGAGTCCACGTTCTTTAATAGTGG |
| | ACTCTTGTTCCAAACTGGAACAACACTCAACCCTATCTCGGTCTATTCTTTTGAT |
| | TTATAAGGGATTTTGCCGATTTCGGCCTATTGGTTAAAAAATGAGCTGATTTAAC |
| | AAAAATTTAACGCGAATTTTAACAAAATATTAACGTTTACAATTTAAATATTTGC |
| | TTATACAATCTTCCTGTTTTTGGGGCTTTTCTGATTATCAACCGGGGTACATATG |
| | ATTGACATGCTAGTTTTACGATTACCGTTCATCGATTCTCTTGTTTGCTCCAGAC |
| | TCTCAGGCAATGACCTGATAGCCTTTGTAGAGACCTCTCAAAAATAGCTACCCTC |
| | TCCGGCATGAATTTATCAGCTAGAACGGTTGAATATCATATTGATGGTGATTTGA |
| | CTGTCTCCGGCCTTTCTCACCCGTTTGAATCTTTACCTACACATTACTCAGGCAT |
| | TGCATTTAAAATATATGAGGGTTCTAAAAATTTTTATCCTTGCGTTGAAATAAAG |
| | GCTTCTCCCGCAAAAGTATTACAGGGTCATAATGTTTTTGGTACAACCGATTTAG |
| | CTTTATGCTCTGAGGCTTTATTGQTTAATTTTGCTAATTCTTTGCCTTGCCTGTA |
| | TGATTTATTGGATGTTGGAATCGCCTGATGCGGTATTTTCTCCTTACGCATCTGT |
| | GCGGTATTTCACACCGCATATGGTGCACTCTCAGTACAATCTGCTCTGATGCCGC |
| | ATAGTTAAGCCAGCCCCGACACCCGCCAACACCCGCTGACGCGCCCTGACGGGCT |
| | TGTCTGCTCCCGGCATCCGCTTACAGACAAGCTGTGACCGTCTCCGGGAGCTGCA |
| | TGTGTCAGAGGTTTTCACCGTCATCACCGAAACGCGCGAGACGAAAGGGCCTCGT |
| | GATACGCCTATTTTTATAGGTTAATGTCATGATAATAATGGTTTCTTAGACGTCA |
| | GGTGGCACTTTTCGGGGAAATGTGCGCGGAACCCCTATTTGTTTATTTTTCTAAA |
| | TACATTCAAATATGTATCCGCTCATGAGACAATAACCCTGATAAATGCTTCAATA |
| | ATATTGAAAAAGGAAGAGTATGAGTATTCAACATTTCCGTGTCGCCCTTATTCCC |
| | TTTTTTGCGGCATTTTGCCTTCCTGTTTTTGCTCACCCAGAAACGCTGGTGAAAG |
| | TAAAAGATGCTGAAGATCAGTTGGGTGCACGAGTGGGTTACATCGAACTGGATCT |
| | CAACAGCGGTAAGATCCTTGAGAGTTTTCGCCCCGAAGAACGTTTTCCAATGATG |
| | AGCACTTTTAAAGTTCTGCTATGTGGCGCGGTATTATCCCGTATTGACGCCGGGC |
| | AAGAGCAACTCGGTCGCCGCATACACTATTCTCAGAATGACTTGGTTGAGTACTC |
| | ACCAGTCACAGAAAAGCATCTTACGGATGGCATGACAGTAAGAGAATTATGCAGT |
| | GCTGCCATAACCATGAGTGATAACACTGCGGCCAACTTACTTCTGACAACGATCG |
| | GAGGACCGAAGGAGCTAACCGCTTTTTTGCACAACATGGGGGATCATGTAACTCG |
| | CCTTGATCGTTGGGAACCGGAGCTGAATGAAGCCATACCAAACGACGAGCGTGAC |
| | ACCACGATGCCTGTAGCAATGGCAACAACGTTGCGCAAACTATTAACTGGCGAAC |
| | TACTTACTCTAGCTTCCCGGCAACAATTAATAGACTGGATGGAGGCGGATAAAGT |
| | TGCAGGACCACTTCTGCGCTCGGCCCTTCCGGCTGGCTGGTTTATTGCTGATAAA |
| | TCTGGAGCCGGTGAGCGTGGGTCTCGCGGTATCATTGCAGCACTGGGGCCAGATG |
| | GTAAGCCCTCCCGTATCGTAGTTATCTACACGACGGGGAGTCAGGCAACTATGGA |
| | TGAACGAAATAGACAGATCGCTGAGATAGGTGCCTCACTGATTAAGCATTGGTAA |
| | CTGTCAGACCAAGTTTACTCATATATACTTTAGATTGATTTAAAACTTCATTTTT |
| | AATTTAAAAGGATCTAGGTGAAGATCCTTTTTGATAATCTCATGACCAAAATCCC |
| | TTAACGTGAGTTTTCGTTCCACTGAGCGTCAGACCCC |
| Construct | GTAGAAAAGATCAAAGGATCTTCTTGAGATCCTTTTTTTCTGCGCGTAATCTGCT |
| 3362 | GCTTGCAAACAAAAAAACCACCGCTACCAGCGGTGGTTTGTTTGCCGGATCAAGA |
| SEQ ID | GCTACCAACTCTTTTTCCGAAGGTAACTGGCTTCAGCAGAGCGCAGATACCAAAT |
| NO: 1447 | ACTGTCCTTCTAGTGTAGCCGTAGTTAGGCCACCACTTCAAGAACTCTGTAGCAC |
| | CGCCTACATACCTCGCTCTGCTAATCCTGTTACCAGTGGCTGCTGCCAGTGGCGA |
| | TAAGTCGTGTCTTACCGGGTTGGACTCAAGACGATAGTTACCGGATAAGGCGCAG |
| | CGGTCGGGCTGAACGGGGGGTTCGTGCACACAGCCCAGCTTGGAGCGAACGACCT |
| | ACACCGAACTGAGATACCTACAGCGTGAGCTATGAGAAAGCGCCACGCTTCCCGA |
| | AGGGAGAAAGGCGGACAGGTATCCGGTAAGCGGCAGGGTCGGAACAGGAGAGCGC |
| | ACGAGGGAGCTTCCAGGGGGAAACGCCTGGTATCTTTATAGTCCTGTCGGGTTTC |
| | GCCACCTCTGACTTGAGCGTCGATTTTTGTGATGCTCGTCAGGGGGGCGGAGCCT |
| | ATGGAAAAACGCCAGCAACGCGGCCTTTTTACGGTTCCTGGCCTTTTGCTGGCCT |
| | TTTGCTCACATGTTCTTTCCTGCGTTATCCCCTGATTCTGTGGATAACCGTATTA |
| | CCGCCTTTGAGTGAGCTGATACCGCTCGCCGCAGCCGAACGACCGAGCGCAGCGA |
| | GTCAGTGAGCGAGGAAGCGGAAGAGCGCCCAATACGCAAACCGCCTCTCCCCGCG |
| | CGTTGGCCGATTCATTAATGCAGCTGCGCGCTCGCTCGCTCACTGAGGCCGCCCG |
| | GGCAAAGCCCGGGCGTCGGGCGACCTTTGGTCGCCCGGCCTCAGTGAGCGAGCGA |
| | GCGCGCAGAGAGGGAGTGGCCAACTCCATCACTAGGGGTTCCTTGTAGTTAATGA |
| | TTAACCCGCCATGCTACTTATCTACGTAGCGGCCGCAGCCTGTGCAGGGTGCAGG |
| | GAGGGCTAGAGGCCTGAGGCTTGAAACAGCTCTCAAGTGGAGGGGGAAACAACCA |
| | TTGCCCTCATAGAGGACACATCCACACCAGGGCTGTGCTAGCGTGGGCAGGCAAG |
| | CCAGGTGCTGGACCTCTGCACGTGGGGCATGTGTGGGTATGTACATGTACCTGTG |
| | TTCTTGGTGTGTGTGTGTGTGTGTGTGTGTGTGTGTGTCTAGAGCTGGGGTGCAA |
| | CTATGGGGCCCCTCGGGACATGTCCCAGCCAATGCCTGCTTTGACCAGAGGAGTG |
| | TCCACGTGGCTCAGGTGGTCGAGTATCTCATACCGCCCTAGCACACGTGTGACTC |
| | CTTTCCCCTATTGTCTACGCAGCCTGCCCTTGGACAAGGACCCGATGCCCAACCC |
| | CAGGCCTGGCAAGCCCTCGGCCCCTTCCTTGGCCCTTGGCCCATCCCCACGCGTA |
| | GGAACAGAGAAACAGGAGAATATGGGCCAAACAGGATATCTGTGGTAAGCAGTTC |
| | CTGCCCCGGCTCAGGGCCAAGAACAGTTGGAACAGCAGAATATGGGCCAAACAGG |
| | ATATCTGTGGTAAGCAGTTCCTGCCCCGGCTCAGGGCCAAGAACAGATGGTCCCC |
| | AGATGCGGTCCCGCCCTCAGCAGTTTCTAGAGAACCATCAGATGTTTCCAGGGTG |
| | CCCCAAGGACCTGAAATGACCCTGTGCCTTATTTGAACTAACCAATCAGTTCGCT |
| | TCTCGCTTCTGTTCGCGCGCTTCTGCTCCCCGAGCTCTATATAAGCAGAGCTCGT |
| | TTAGTGAACCGTCAGATCGCCTGGAGACGCCATCCACGCTGTTTTGACTTCCATA |
| | GAAGGATCTCGAGGCCACCATGCCTCTGGGCCTGCTGTGGCTGGGCCTGGCCCTG |
| | CTGGGCGCCCTGCACGCCCAGGCCGAGATGTGGCACGAGGGCCTGGAGGAGGCCA |
| | GCAGGCTGTATTTTGGCGAGCGCAACGTGAAGGGCATGTTCGAGGTGCTGGAGCC |
| | TCTGCACGCCATGATGGAGAGAGGCCCACAGACCCTGAAGGAGACATCCTTTAAC |
| | CAGGCCTATGGACGGGACCTGATGGAGGCACAGGAGTGGTGCAGAAAGTACATGA |
| | AGTCTGGCAATGTGAAGGACCTGCTGCAGGCCTGGGATCTGTACTATCACGTGTT |
| | TCGGAGAATCTCCAAGGGCAAAGACACGATTCCGTGGCTTGGGCATCTGCTCGTT |
| | GGGCTGAGTGGTGCGTTTGGTTTCATCATCTTGGTCTATCTCTTGATCAATTGCA |
| | GAAATACAGGCCCTTGGCTGAAAAAAGTGCTCAAGTGTAATACCCCCGACCCAAG |
| | CAAGTTCTTCTCCCAGCTTTCTTCAGAGCATGGAGGCGATGTGCAGAAATGGCTC |
| | TCTTCACCTTTTCCCTCCTCAAGTTTCTCCCCGGGAGGGCTGGCGCCCGAGATTT |
| | CACCTCTTGAGGTACTTGAACGAGACAAGGTTACCCAACTTCTCCTTCAACAGGA |
| | TAAGGTACCCGAACCTGCGAGCCTTAGCTCCAACCACTCTCTTACGAGCTGCTTC |
| | ACCAATCAGGGATACTTCTTTTTCCACCTTCCCGATGCGCTGGAAATCGAAGCAT |
| | GTCAAGTTTACTTTACCTATGATCCATATAGCGAGGAAGATCCCGACGAAGGAGT |
| | CGCCGGTGCGCCCACGGGTTCCTCACCCCAACCTCTCCAGCCTCTCTCAGGAGAA |
| | GATGATGCTTATTGCACTTTTCCCAGTAGAGACGATCTCCTCCTCTTTTCTCCAT |
| | CTCTTTTGGGGGGACCTTCCCCCCCTTCTACGGCACCTGGCGGGTCTGGTGCTGG |
| | CGAGGAGCGGATGCCGCCGTCCCTCCAGGAGCGAGTACCACGAGATTGGGATCCC |
| | CAGCCACTTGGACCACCAACTCCAGGCGTACCTGACCTTGTCGATTTTCAACCTC |
| | CCCCTGAATTGGTGCTGCGAGAGGCTGGGGAGGAAGTTCCGGACGCTGGGCCGAG |
| | GGAGGGCGTGTCCTTTCCATGGAGTAGGCCTCCAGGTCAAGGCGAGTTTAGGGCT |
| | CTCAACGCGCGGCTGCCGTTGAATACAGACGCTTATCTCTCACTGCAGGAACTGC |
| | AAGGTCAGGACCCAACACATCTTGTAGGATCCGGCGCCACCAACTTTAGTCTGCT |
| | CAAGCAAGCCGGGGACGTCGAGGAAAATCCTGGGCCAGAAATGTGGCACGAAGGA |
| | CTCGAGGAAGCCAGTCGGCTGTATTTTGGCGAGCGGAATGTGAAAGGGATGTTTG |
| | AAGTGCTCGAGCCTCTCCACGCTATGATGGAACGGGGACCCCAGACTCTCAAAGA |
| | AACCAGCTTTAATCAGGCTTACGGACGCGACCTCATGGAAGCTCAAGAATGGTGT |
| | AGAAAGTATATGAAGAGTGGCAACGTGAAAGATCTGCTGCAAGCCTGGGATCTCT |
| | ATTATCACGTGTTCAGACGCATCAGCAAAGGCAGCGGCGCCACAAATTTCTCCCT |
| | GCTGAAACAGGCCGGCGACGTGGAAGAGAATCCCGGACCTTATCCATACGATGTC |
| | CCAGATTATGCGCCCAATCCTAGACCTGGCAAGCCCAGCGCTCCTTCTCTTGCTC |
| | TTGGACCTTCTCCTGGTGCCTCGCCCAGCTGGAGGGCTGCACCCAAAGCCTCAGA |
| | CCTGCTGGGGGCCCGGGGCCCAGGGGGAACCTTCCAGGGCCGAGATCTTCGAGGC |
| | GGGGCCCATGCCTCCTCTTCTTCCTTGAACCCCATGCCACCATCGCAGCTGCAGG |
| | TGAGGCCCTGGGCCCAGGATGGGGCAGGCAGGGTGGGGTACCTGGACCTACAGGT |
| | GCCGACCTTTACTGTGGCACTGGGCGGGAGGGGGGCTGGCTGGGGCACAGGAAGT |
| | GGTTTCTGGGTCCCAGGCAAGTCTGTGACTTATGCAGATGTTGCAGGGCCAAGAA |
| | AATCCCCACCTGCCAGGCCTCAGAGATTGGAGGCTCTCCCCGACCTCCCAATCCC |
| | TGTCTCAGGAGAGGAGGAGGCCGTATTGTAGTCCCATGAGCATAGCTATGTGTCC |
| | CCATCCCCATGTGACAAGAGAAGAGGAGGATCCTACGTAGATAAGTAGCATGGCG |
| | GGTTAATCATTAACTACAAGGAACCCCTAGTGATGGAGTTGGCCACTCCCTCTCT |
| | GCGCGCTCGCTCGCTCACTGAGGCCGGGCGACCAAAGGTCGCCCGACGCCCGGGC |
| | TTTGCCCGGGCGGCCTCAGTGAGCGAGCGAGCGCGCCAGCTGGCGTAATAGCGAA |
| | GAGGCCCGCACCGATCGCCCTTCCCAACAGTTGCGCAGCCTGAATGGCGAATGGC |
| | GATTCCGTTGCAATGGCTGGCGGTAATATTGTTCTGGATATTACCAGCAAGGCCG |
| | ATAGTTTGAGTTCTTCTACTCAGGCAAGTGATGTTATTACTAATCAAAGAAGTAT |
| | TGCGACAACGGTTAATTTGCGTGATGGACAGACTCTTTTACTCGGTGGCCTCACT |
| | GATTATAAAAACACTTCTCAGGATTCTGGCGTACCGTTCCTGTCTAAAATCCCTT |
| | TAATCGGCCTCCTGTTTAGCTCCCGCTCTGATTCTAACGAGGAAAGCACGTTATA |
| | CGTGCTCGTCAAAGCAACCATAGTACGCGCCCTGTAGCGGCGCATTAAGCGCGGC |
| | GGGTGTGGTGGTTACGCGCAGCGTGACCGCTACACTTGCCAGCGCCCTAGCGCCC |
| | GCTCCTTTCGCTTTCTTCCCTTCCTTTCTCGCCACGTTCGCCGGCTTTCCCCGTC |
| | AAGCTCTAAATCGGGGGCTCCCTTTAGGGTTCCGATTTAGTGCTTTACGGCACCT |
| | CGACCCCAAAAAACTTGATTAGGGTGATGGTTCACGTAGTGGGCCATCGCCCTGA |
| | TAGACGGTTTTTCGCCCTTTGACGTTGGAGTCCACGTTCTTTAATAGTGGACTCT |
| | TGTTCCAAACTGGAACAACACTCAACCCTATCTCGGTCTATTCTTTTGATTTATA |
| | AGGGATTTTGCCGATTTCGGCCTATTGGTTAAAAAATGAGCTGATTTAACAAAAA |
| | TTTAACGCGAATTTTAACAAAATATTAACGTTTACAATTTAAATATTTGCTTATA |
| | CAATCTTCCTGTTTTTGGGGCTTTTCTGATTATCAACCGGGGTACATATGATTGA |
| | CATGCTAGTTTTACGATTACCGTTCATCGATTCTCTTGTTTGCTCCAGACTCTCA |
| | GGCAATGACCTGATAGCCTTTGTAGAGACCTCTCAAAAATAGCTACCCTCTCCGG |
| | CATGAATTTATCAGCTAGAACGGTTGAATATCATATTGATGGTGATTTGACTGTC |
| | TCCGGCCTTTCTCACCCGTTTGAATCTTTACCTACACATTACTCAGGCATTGCAT |
| | TTAAAATATATGAGGGTTCTAAAAATTTTTATCCTTGCGTTGAAATAAAGGCTTC |
| | TCCCGCAAAAGTATTACAGGGTCATAATGTTTTTGGTACAACCGATTTAGCTTTA |
| | TGCTCTGAGGCTTTATTGCTTAATTTTGCTAATTCTTTGCCTTGCCTGTATGATT |
| | TATTGGATGTTGGAATCGCCTGATGCGGTATTTTCTCCTTACGCATCTGTGCGGT |
| | ATTTCACACCGCATATGGTGCACTCTCAGTACAATCTGCTCTGATGCCGCATAGT |
| | TAAGCCAGCCCCGACACCCGCCAACACCCGCTGACGCGCCCTGACGGGCTTGTCT |
| | GCTCCCGGCATCCGCTTACAGACAAGCTGTGACCGTCTCCGGGAGCTGCATGTGT |
| | CAGAGGTTTTCACCGTCATCACCGAAACGCGCGAGACGAAAGGGCCTCGTGATAC |
| | GCCTATTTTTATAGGTTAATGTCATGATAATAATGGTTTCTTAGACGTCAGGTGG |
| | CACTTTTCGGGGAAATGTGCGCGGAACCCCTATTTGTTTATTTTTCTAAATACAT |
| | TCAAATATGTATCCGCTCATGAGACAATAACCCTGATAAATGCTTCAATAATATT |
| | GAAAAAGGAAGAGTATGAGTATTCAACATTTCCGTGTCGCCCTTATTCCCTTTTT |
| | TGCGGCATTTTGCCTTCCTGTTTTTGCTCACCCAGAAACGCTGGTGAAAGTAAAA |
| | GATGCTGAAGATCAGTTGGGTGCACGAGTGGGTTACATCGAACTGGATCTCAACA |
| | GCGGTAAGATCCTTGAGAGTTTTCGCCCCGAAGAACGTTTTCCAATGATGAGCAC |
| | TTTTAAAGTTCTGCTATGTGGCGCGGTATTATCCCGTATTGACGCCGGGCAAGAG |
| | CAACTCGGTCGCCGCATACACTATTCTCAGAATGACTTGGTTGAGTACTCACCAG |
| | TCACAGAAAAGCATCTTACGGATGGCATGACAGTAAGAGAATTATGCAGTGCTGC |
| | CATAACCATGAGTGATAACACTGCGGCCAACTTACTTCTGACAACGATCGGAGGA |
| | CCGAAGGAGCTAACCGCTTTTTTGCACAACATGGGGGATCATGTAACTCGCCTTG |
| | ATCGTTGGGAACCGGAGCTGAATGAAGCCATACCAAACGACGAGCGTGACACCAC |
| | GATGCCTGTAGCAATGGCAACAACGTTGCGCAAACTATTAACTGGCGAACTACTT |
| | ACTCTAGCTTCCCGGCAACAATTAATAGACTGGATGGAGGCGGATAAAGTTGCAG |
| | GACCACTTCTGCGCTCGGCCCTTCCGGCTGGCTGGTTTATTGCTGATAAATCTGG |
| | AGCCGGTGAGCGTGGGTCTCGCGGTATCATTGCAGCACTGGGGCCAGATGGTAAG |
| | CCCTCCCGTATCGTAGTTATCTACACGACGGGGAGTCAGGCAACTATGGATGAAC |
| | GAAATAGACAGATCGCTGAGATAGGTGCCTCACTGATTAAGCATTGGTAACTGTC |
| | AGACCAAGTTTACTCATATATACTTTAGATTGATTTAAAACTTCATTTTTAATTT |
| | AAAAGGATCTAGGTGAAGATCCTTTTTGATAATCTCATGACCAAAATCCCTTAAC |
| | GTGAGTTTTCGTTCCACTGAGCGTCAGACCCC |
| Construct | GTAGAAAAGATCAAAGGATCTTCTTGAGATCCTTTTTTTCTGCGCGTAATCTGCT |
| 3363 | GCTTGCAAACAAAAAAACCACCGCTACCAGCGGTGGTTTGTTTGCCGGATCAAGA |
| SEQ ID | GCTACCAACTCTTTTTCCGAAGGTAACTGGCTTCAGCAGAGCGCAGATACCAAAT |
| NO: 1448 | ACTGTCCTTCTAGTGTAGCCGTAGTTAGGCCACCACTTCAAGAACTCTGTAGCAC |
| | CGCCTACATACCTCGCTCTGCTAATCCTGTTACCAGTGGCTGCTGCCAGTGGCGA |
| | TAAGTCGTGTCTTACCGGGTTGGACTCAAGACGATAGTTACCGGATAAGGCGCAG |
| | CGGTCGGGCTGAACGGGGGGTTCGTGCACACAGCCCAGCTTGGAGCGAACGACCT |
| | ACACCGAACTGAGATACCTACAGCGTGAGCTATGAGAAAGCGCCACGCTTCCCGA |
| | AGGGAGAAAGGCGGACAGGTATCCGGTAAGCGGCAGGGTCGGAACAGGAGAGCGC |
| | ACGAGGGAGCTTCCAGGGGGAAACGCCTGGTATCTTTATAGTCCTGTCGGGTTTC |
| | GCCACCTCTGACTTGAGCGTCGATTTTTGTGATGCTCGTCAGGGGGGCGGAGCCT |
| | ATGGAAAAACGCCAGCAACGCGGCCTTTTTACGGTTCCTGGCCTTTTGCTGGCCT |
| | TTTGCTCACATGTTCTTTCCTGCGTTATCCCCTGATTCTGTGGATAACCGTATTA |
| | CCGCCTTTGAGTGAGCTGATACCGCTCGCCGCAGCCGAACGACCGAGCGCAGCGA |
| | GTCAGTGAGCGAGGAAGCGGAAGAGCGCCCAATACGCAAACCGCCTCTCCCCGCG |
| | CGTTGGCCGATTCATTAATGCAGCTGCGCGCTCGCTCGCTCACTGAGGCCGCCCG |
| | GGCAAAGCCCGGGCGTCGGGCGACCTTTGGTCGCCCGGCCTCAGTGAGCGAGCGA |
| | GCGCGCAGAGAGGGAGTGGCCAACTCCATCACTAGGGGTTCCTTGTAGTTAATGA |
| | TTAACCCGCCATGCTACTTATCTACGTACCCTATTAAATAAAAGAATAAGCAGTA |
| | TTATTAAGTAGCCCTGCATTTCAGGTTTCCTTGAGTGGCAGGCCAGGCCTGGCCG |
| | TGAACGTTCACTGAAATCATGGCCTCTTGGCCAAGATTGATAGCTTGTGCCTGTC |
| | CCTGAGTCCCAGTCCATCACGAGCAGCTGGTTTCTAAGATGCTATTTCCCGTATA |
| | AAGCATGAGACCGTGACTTGCCAGCCCCACAGAGCCCCGCCCTTGTCCATCACTG |
| | GCATCTGGACTCCAGCCTGGGTTGGGGCAAAGAGGGAAATGAGATCATGTCCTAC |
| | GCGTAGGAACAGAGAAACAGGAGAATATGGGCCAAACAGGATATCTGTGGTAAGC |
| | AGTTCCTGCCCCGGCTCAGGGCCAAGAACAGTTGGAACAGCAGAATATGGGCCAA |
| | ACAGGATATCTGTGGTAAGCAGTTCCTGCCCCGGCTCAGGGCCAAGAACAGATGG |
| | TCCCCAGATGCGGTCCCGCCCTCAGCAGTTTCTAGAGAACCATCAGATGTTTCCA |
| | GGGTGCCCCAAGGACCTGAAATGACCCTGTGCCTTATTTGAACTAACCAATCAGT |
| | TCGCTTCTCGCTTCTGTTCGCGCGCTTCTGCTCCCCGAGCTCTATATAAGCAGAG |
| | CTCGTTTAGTGAACCGTCAGATCGCCTGGAGACGCCATCCACGCTGTTTTGACTT |
| | CCATAGAAGGATCATGCCTCTGGGCCTGCTGTGGCTGGGCCTGGCCCTGCTGGGC |
| | GCCCTGCACGCCCAGGCCGGCGTGCAGGTGGAGACAATCTCCCCAGGCGACGGAC |
| | GCACATTCCCTAAGCGGGGCCAGACCTGCGTGGTGCACTATACAGGCATGCTGGA |
| | GGATGGCAAGAAGTTTGACAGCTCCCGGGATAGAAACAAGCCATTCAAGTTTATG |
| | CTGGGCAAGCAGGAAGTGATCAGAGGCTGGGAGGAGGGCGTGGCCCAGATGTCTG |
| | TGGGCCAGAGGGCCAAGCTGACCATCAGCCCAGACTACGCCTATGGAGCAACAGG |
| | CCACCCAGGAATCATCCCACCTCACGCCACCCTGGTGTTCGATGTGGAGCTGCTG |
| | AAGCTGGGCGAGGGATCCAACACATCAAAAGAGAACCCCTTTCTGTTCGCATTGG |
| | AGGCCGTAGTCATATCTGTTGGATCCATGGGACTTATTATCTCCCTGTTGTGTGT |
| | GTACTTCTGGCTGGAACGGACTATGCCCAGGATCCCCACGCTCAAGAATCTGGAA |
| | GATCTCGTCACAGAATACCATGGTAATTTCAGCGCCTGGAGCGGAGTCTCTAAGG |
| | GTCTGGCCGAATCCCTCCAACCCGATTATTCTGAACGGTTGTGCCTCGTATCCGA |
| | AATACCACCAAAAGGGGGGCTCTGGGTGAGGGCCCAGGGGCGAGTCCGTGCAATC |
| | AACACAGCCCGTATTGGGCCCCTCCTTGTTATACGTTGAAGCCCGAAACTGGATC |
| | CGGCGCCACCAACTTTAGTCTGCTCAAGCAAGCCGGGGACGTCGAGGAAAATCCT |
| | GGGCCAATGGGATCAAGACTGCTGTGCTGGGTGCTGCTGTGCCTGCTGGGAGCCG |
| | GACCTGTGAAAGCCGGGGTGACTCAGACTCCACGATACCTGATCAAGACCAGGGG |
| | CCAGCAGGTGACACTGTCTTGCAGCCCAATCTCCGGACACCGCTCCGTGTCTTGG |
| | TACCAGCAGACCCCTGGACAGGGACTGCAGTTCCTGTTTGAGTATTTCTCTGAGA |
| | CACAGCGGAACAAGGGCAATTTCCCCGGCCGGTTTAGCGGCAGACAGTTTAGCAA |
| | CTCCAGGTCTGAGATGAATGTGAGCACCCTGGAGCTGGGCGACTCCGCCCTGTAC |
| | CTGTGCGCAAGCTCCCTGGCCCTGGGACAGGGGAATCAGCAGTTTTTCGGACCCG |
| | GAACAAGGCTGACCGTGCTGGAGGATCTACGTAACGTGACACCACCCAAAGTCTC |
| | ACTGTTTGAGCCTAGCAAGGCAGAAATTGCCAACAAGCAGAAGGCCACCCTGGTG |
| | TGCCTGGCAAGAGGGTTCTTTCCAGATCACGTGGAGCTGTCCTGGTGGGTCAACG |
| | GCAAAGAAGTGCATTCTGGGGTCTGCACCGACCCCCAGGCTTACAAGGAGAGTAA |
| | TTACTCATATTGTCTGTCAAGCCGGCTGAGAGTGTCCGCCACATTCTGGCACAAC |
| | CCTAGGAATCATTTCCGCTGCCAGGTCCAGTTTCACGGCCTGAGTGAGGAAGATA |
| | AATGGCCAGAGGGGTCACCTAAGCCAGTGACACAGAACATCAGCGCAGAAGCCTG |
| | GGGACGAGCAGACTGTGGCATTACTAGCGCCTCCTATCATCAGGGCGTGCTGAGC |
| | GCCACTATCCTGTACGAGATTCTGCTGGGAAAGGCCACCCTGTATGCTGTGCTGG |
| | TCTCCGGCCTGGTGCTGATGGCCATGGTCAAGAAAAAGAACTCTGGGAGTGGAGC |
| | CACAAATTTCTCTCTGCTGAAACAGGCTGGAGATGTGGAGGAAAACCCCGGCCCT |
| | ATGAAGAGCCTGCGCGTGCTGCTGGTCATCCTGTGGCTGCAATTGAGTTGGGTGT |
| | GGAGCCAGAAGGACCAGGTGTTTCAGCCTAGCACTGTCGCATCATCAGAGGGGGC |
| | CGTCGTGGAAATCTTTTGTAATCACAGCGTGTCCAACGCCTACAATTTCTTTTGG |
| | TATCTGCACTTCCCAGGATGCGCACCTAGGCTGCTGGTGAAGGGCTCTAAGCCCA |
| | GCCAGCAGGGCCGGTACAACATGACCTATGAGCGGTTCAGCTCCTCTCTGCTGAT |
| | CCTGCAGGTGCGGGAGGCAGACGCAGCCGTGTACTATTGTGCCGTGGAGGATCTG |
| | AATCAGGCCGGCACAGCCCTGATTTTCGGCAAAGGAACAACCCTGAGCGTGAGCA |
| | GCATCCAGAACCCTGACCCAGCCGTATACCAGCTGAGAGACTCTAAATCCAGTGA |
| | CAAGTCTGTCTGCCTATTCACCGATTTTGATTCTCAAACAAATGTGTCACAAAGT |
| | AAGGATTCTGATGTGTATATCACAGACAAAACTGTGCTAGACATGAGGTCTATGG |
| | ACTTCAAGAGCAACAGTGCTGTGGCCTGGAGCAACAAATCTGACTTTGCATGTGC |
| | AAACGCCTTCAACAACAGCATTATTCCAGAAGACACCTTCTTCCCCAGCCCAGGT |
| | AAGGGCAGCTTTGGTGCCTTCGCAGGCTGTTTCCTTGCTTCAGGAATGGATCCTA |
| | CGTAGATAAGTAGCATGGCGGGTTAATCATTAACTACAAGGAACCCCTAGTGATG |
| | GAGTTGGCCACTCCCTCTCTGCGCGCTCGCTCGCTCACTGAGGCCGGGCGACCAA |
| | AGGTCGCCCGACGCCCGGGCTTTGCCCGGGCGGCCTCAGTGAGCGAGCGAGCGCG |
| | CCAGCTGGCGTAATAGCGAAGAGGCCCGCACCGATCGCCCTTCCCAACAGTTGCG |
| | CAGCCTGAATGGCGAATGGCGATTCCGTTGCAATGGCTGGCGGTAATATTGTTCT |
| | GGATATTACCAGCAAGGCCGATAGTTTGAGTTCTTCTACTCAGGCAAGTGATGTT |
| | ATTACTAATCAAAGAAGTATTGCGACAACGGTTAATTTGCGTGATGGACAGACTC |
| | TTTTACTCGGTGGCCTCACTGATTATAAAAACACTTCTCAGGATTCTGGCGTACC |
| | GTTCCTGTCTAAAATCCCTTTAATCGGCCTCCTGTTTAGCTCCCGCTCTGATTCT |
| | AACGAGGAAAGCACGTTATACGTGCTCGTCAAAGCAACCATAGTACGCGCCCTGT |
| | AGCGGCGCATTAAGCGCGGCGGGTGTGGTGGTTACGCGCAGCGTGACCGCTACAC |
| | TTGCCAGCGCCCTAGCGCCCGCTCCTTTCGCTTTCTTCCCTTCCTTTCTCGCCAC |
| | GTTCGCCGGCTTTCCCCGTCAAGCTCTAAATCGGGGGCTCCCTTTAGGGTTCCGA |
| | TTTAGTGCTTTACGGCACCTCGACCCCAAAAAACTTGATTAGGGTGATGGTTCAC |
| | GTAGTGGGCCATCGCCCTGATAGACGGTTTTTCGCCCTTTGACGTTGGAGTCCAC |
| | GTTCTTTAATAGTGGACTCTTGTTCCAAACTGGAACAACACTCAACCCTATCTCG |
| | GTCTATTCTTTTGATTTATAAGGGATTTTGCCGATTTCGGCCTATTGGTTAAAAA |
| | ATGAGCTGATTTAACAAAAATTTAACGCGAATTTTAACAAAATATTAACGTTTAC |
| | AATTTAAATATTTGCTTATACAATCTTCCTGTTTTTGGGGCTTTTCTGATTATCA |
| | ACCGGGGTACATATGATTGACATGCTAGTTTTACGATTACCGTTCATCGATTCTC |
| | TTGTTTGCTCCAGACTCTCAGGCAATGACCTGATAGCCTTTGTAGAGACCTCTCA |
| | AAAATAGCTACCCTCTCCGGCATGAATTTATCAGCTAGAACGGTTGAATATCATA |
| | TTGATGGTGATTTGACTGTCTCCGGCCTTTCTCACCCGTTTGAATCTTTACCTAC |
| | ACATTACTCAGGCATTGCATTTAAAATATATGAGGGTTCTAAAAATTTTTATCCT |
| | TGCGTTGAAATAAAGGCTTCTCCCGCAAAAGTATTACAGGGTCATAATGTTTTTG |
| | GTACAACCGATTTAGCTTTATGCTCTGAGGCTTTATTGCTTAATTTTGCTAATTC |
| | TTTGCCTTGCCTGTATGATTTATTGGATGTTGGAATCGCCTGATGCGGTATTTTC |
| | TCCTTACGCATCTGTGCGGTATTTCACACCGCATATGGTGCACTCTCAGTACAAT |
| | CTGCTCTGATGCCGCATAGTTAAGCCAGCCCCGACACCCGCCAACACCCGCTGAC |
| | GCGCCCTGACGGGCTTGTCTGCTCCCGGCATCCGCTTACAGACAAGCTGTGACCG |
| | TCTCCGGGAGCTGCATGTGTCAGAGGTTTTCACCGTCATCACCGAAACGCGCGAG |
| | ACGAAAGGGCCTCGTGATACGCCTATTTTTATAGGTTAATGTCATGATAATAATG |
| | GTTTCTTAGACGTCAGGTGGCACTTTTCGGGGAAATGTGCGCGGAACCCCTATTT |
| | GTTTATTTTTCTAAATACATTCAAATATGTATCCGCTCATGAGACAATAACCCTG |
| | ATAAATGCTTCAATAATATTGAAAAAGGAAGAGTATGAGTATTCAACATTTCCGT |
| | GTCGCCCTTATTCCCTTTTTTGCGGCATTTTGCCTTCCTGTTTTTGCTCACCCAG |
| | AAACGCTGGTGAAAGTAAAAGATGCTGAAGATCAGTTGGGTGCACGAGTGGGTTA |
| | CATCGAACTGGATCTCAACAGCGGTAAGATCCTTGAGAGTTTTCGCCCCGAAGAA |
| | CGTTTTCCAATGATGAGCACTTTTAAAGTTCTGCTATGTGGCGCGGTATTATCCC |
| | GTATTGACGCCGGGCAAGAGCAACTCGGTCGCCGCATACACTATTCTCAGAATGA |
| | CTTGGTTGAGTACTCACCAGTCACAGAAAAGCATCTTACGGATGGCATGACAGTA |
| | AGAGAATTATGCAGTGCTGCCATAACCATGAGTGATAACACTGCGGCCAACTTAC |
| | TTCTGACAACGATCGGAGGACCGAAGGAGCTAACCGCTTTTTTGCACAACATGGG |
| | GGATCATGTAACTCGCCTTGATCGTTGGGAACCGGAGCTGAATGAAGCCATACCA |
| | AACGACGAGCGTGACACCACGATGCCTGTAGCAATGGCAACAACGTTGCGCAAAC |
| | TATTAACTGGCGAACTACTTACTCTAGCTTCCCGGCAACAATTAATAGACTGGAT |
| | GGAGGCGGATAAAGTTGCAGGACCACTTCTGCGCTCGGCCCTTCCGGCTGGCTGG |
| | TTTATTGCTGATAAATCTGGAGCCGGTGAGCGTGGGTCTCGCGGTATCATTGCAG |
| | CACTGGGGCCAGATGGTAAGCCCTCCCGTATCGTAGTTATCTACACGACGGGGAG |
| | TCAGGCAACTATGGATGAACGAAATAGACAGATCGCTGAGATAGGTGCCTCACTG |
| | ATTAAGCATTGGTAACTGTCAGACCAAGTTTACTCATATATACTTTAGATTGATT |
| | TAAAACTTCATTTTTAATTTAAAAGGATCTAGGTGAAGATCCTTTTTGATAATCT |
| | CATGACCAAAATCCCTTAACGTGAGTTTTCGTTCCACTGAGCGTCAGACCCC |
| Construct | GTAGAAAAGATCAAAGGATCTTCTTGAGATCCTTTTTTTCTGCGCGTAATCTGCT |
| 3364 | GCTTGCAAACAAAAAAACCACCGCTACCAGCGGTGGTTTGTTTGCCGGATCAAGA |
| SEQ ID | GCTACCAACTCTTTTTCCGAAGGTAACTGGCTTCAGCAGAGCGCAGATACCAAAT |
| NO: 1449 | ACTGTCCTTCTAGTGTAGCCGTAGTTAGGCCACCACTTCAAGAACTCTGTAGCAC |
| | CGCCTACATACCTCGCTCTGCTAATCCTGTTACCAGTGGCTGCTGCCAGTGGCGA |
| | TAAGTCGTGTCTTACCGGGTTGGACTCAAGACGATAGTTACCGGATAAGGCGCAG |
| | CGGTCGGGCTGAACGGGGGGTTCGTGCACACAGCCCAGCTTGGAGCGAACGACCT |
| | ACACCGAACTGAGATACCTACAGCGTGAGCTATGAGAAAGCGCCACGCTTCCCGA |
| | AGGGAGAAAGGCGGACAGGTATCCGGTAAGCGGCAGGGTCGGAACAGGAGAGCGC |
| | ACGAGGGAGCTTCCAGGGGGAAACGCCTGGTATCTTTATAGTCCTGTCGGGTTTC |
| | GCCACCTCTGACTTGAGCGTCGATTTTTGTGATGCTCGTCAGGGGGGCGGAGCCT |
| | ATGGAAAAACGCCAGCAACGCGGCCTTTTTACGGTTCCTGGCCTTTTGCTGGCCT |
| | TTTGCTCACATGTTCTTTCCTGCGTTATCCCCTGATTCTGTGGATAACCGTATTA |
| | CCGCCTTTGAGTGAGCTGATACCGCTCGCCGCAGCCGAACGACCGAGCGCAGCGA |
| | GTCAGTGAGCGAGGAAGCGGAAGAGCGCCCAATACGCAAACCGCCTCTCCCCGCG |
| | CGTTGGCCGATTCATTAATGCAGCTGCGCGCTCGCTCGCTCACTGAGGCCGCCCG |
| | GGCAAAGCCCGGGCGTCGGGCGACCTTTGGTCGCCCGGCCTCAGTGAGCGAGCGA |
| | GCGCGCAGAGAGGGAGTGGCCAACTCCATCACTAGGGGTTCCTTGTAGTTAATGA |
| | TTAACCCGCCATGCTACTTATCTACGTAGCGGCCGCACTGAAATCATGGCCTCTT |
| | GGCCAAGATTGATAGCTTGTGCCTGTCCCTGAGTCCCAGTCCATCACGAGCAGCT |
| | GGTTTCTAAGATGCTATTTCCCGTATAAAGCATGAGACCGTGACTTGCCAGCCCC |
| | ACAGAGCCCCGCCCTTGTCCATCACTGGCATCTGGACTCCAGCCTGGGTTGGGGC |
| | AAAGAGGGAAATGAGATCATGTCCTAACCCTGATCCTCTTGTCCCACAGATATCC |
| | AGAACCCTGACCCTGCCGTGTACCAGCTGAGAGACTCTAAATCCAGTGACAAGTC |
| | TGTCTGCCTATATTAAGGAACAGAGAAACAGGAGAATATGGGCCAAACAGGATAT |
| | CTGTGGTAAGCAGTTCCTGCCCCGGCTCAGGGCCAAGAACAGTTGGAACAGCAGA |
| | ATATGGGCCAAACAGGATATCTGTGGTAAGCAGTTCCTGCCCCGGCTCAGGGCCA |
| | AGAACAGATGGTCCCCAGATGCGGTCCCGCCCTCAGCAGTTTCTAGAGAACCATC |
| | AGATGTTTCCAGGGTGCCCCAAGGACCTGAAATGACCCTGTGCCTTATTTGAACT |
| | AACCAATCAGTTCGCTTCTCGCTTCTGTTCGCGCGCTTCTGCTCCCCGAGCTCTA |
| | TATAAGCAGAGCTCGTTTAGTGAACCGTCAGATCGCCTGGAGACGCCATCCACGC |
| | TGTTTTGACTTCCATAGAAGGATCGACTCGAGTAATGCCTCTGGGCCTGCTGTGG |
| | CTGGGCCTGGCCCTGCTGGGCGCCCTGCACGCCCAGGCCGGCGTGCAGGTGGAGA |
| | CAATCTCCCCAGGCGACGGACGCACATTCCCTAAGCGGGGCCAGACCTGCGTGGT |
| | GCACTATACAGGCATGCTGGAGGATGGCAAGAAGTTTGACAGCTCCCGGGATAGA |
| | AACAAGCCATTCAAGTTTATGCTGGGCAAGCAGGAAGTGATCAGAGGCTGGGAGG |
| | AGGGCGTGGCCCAGATGTCTGTGGGCCAGAGGGCCAAGCTGACCATCAGCCCAGA |
| | CTACGCCTATGGAGCAACAGGCCACCCAGGAATCATCCCACCTCACGCCACCCTG |
| | GTGTTCGATGTGGAGCTGCTGAAGCTGGGCGAGGGATCCAACACATCAAAAGAGA |
| | ACCCCTTTCTGTTCGCATTGGAGGCCGTAGTCATATCTGTTGGATCCATGGGACT |
| | TATTATCTCCCTGTTGTGTGTGTACTTCTGGCTGGAACGGACTATGCCCAGGATC |
| | CCCACGCTCAAGAATCTGGAAGATCTCGTCACAGAATACCATGGTAATTTCAGCG |
| | CCTGGAGCGGAGTCTCTAAGGGTCTGGCCGAATCCCTCCAACCCGATTATTCTGA |
| | ACGGTTGTGCCTCGTATCCGAAATACCACCAAAAGGCGGGGCTCTGGGTGAGGGC |
| | CCAGGGGCGAGTCCGTGCAATCAACACAGCCCGTATTGGGCCCCTCCTTGTTATA |
| | CGTTGAAGCCCGAAACTGGCTCCGGCGCCACCAACTTTAGTCTGCTCAAGCAAGC |
| | CGGGGACGTCGAGGAAAATCCTGGGCCAATGGGATCAAGACTGCTGTGCTGGGTG |
| | CTGCTGTGCCTGCTGGGAGCCGGACCTGTGAAAGCCGGGGTGACTCAGACTCCAC |
| | GATACCTGATCAAGACCAGGGGCCAGCAGGTGACACTGTCTTGCAGCCCAATCTC |
| | CGGACACCGCTCCGTGTCTTGGTACCAGCAGACCCCTGGACAGGGACTGCAGTTC |
| | CTGTTTGAGTATTTCTCTGAGACACAGCGGAACAAGGGCAATTTCCCCGGCCGGT |
| | TTAGCGGCAGACAGTTTAGCAACTCCAGGTCTGAGATGAATGTGAGCACCCTGGA |
| | GCTGGGCGACTCCGCCCTGTACCTGTGCGCAAGCTCCCTGGCCCTGGGACAGGGG |
| | AATCAGCAGTTTTTCGGACCCGGAACAAGGCTGACCGTGCTGGAGGATCTACGTA |
| | ACGTGACACCACCCAAAGTCTCACTGTTTGAGCCTAGCAAGGCAGAAATTGCCAA |
| | CAAGCAGAAGGCCACCCTGGTGTGCCTGGCAAGAGGGTTCTTTCCAGATCACGTG |
| | GAGCTGTCCTGGTGGGTCAACGGCAAAGAAGTGCATTCTGGGGTCTGCACCGACC |
| | CCCAGGCTTACAAGGAGAGTAATTACTCATATTGTCTGTCAAGCCGGCTGAGAGT |
| | GTCCGCCACATTCTGGCACAACCCTAGGAATCATTTCCGCTGCCAGGTCCAGTTT |
| | CACGGCCTGAGTGAGGAAGATAAATGGCCAGAGGGGTCACCTAAGCCAGTGACAC |
| | AGAACATCAGCGCAGAAGCCTGGGGACGAGCAGACTGTGGCATTACTAGCGCCTC |
| | CTATCATCAGGGCGTGCTGAGCGCCACTATCCTGTACGAGATTCTGCTGGGAAAG |
| | GCCACCCTGTATGCTGTGCTGGTCTCCGGCCTGGTGCTGATGGCCATGGTCAAGA |
| | AAAAGAACTCTGGGAGTGGAGCCACAAATTTCTCTCTGCTGAAACAGGCTGGAGA |
| | TGTGGAGGAAAACCCCGGCCCTATGAAGAGCCTGCGCGTGCTGCTGGTCATCCTG |
| | TGGCTGCAATTGAGTTGGGTGTGGAGCCAGAAGGACCAGGTGTTTCAGCCTAGCA |
| | CTGTCGCATCATCAGAGGGGGCCGTCGTGGAAATCTTTTGTAATCACAGCGTGTC |
| | CAACGCCTACAATTTCTTTTGGTATCTGCACTTCCCAGGATGCGCACCTAGGCTG |
| | CTGGTGAAGGGCTCTAAGCCCAGCCAGCAGGGCCGGTACAACATGACCTATGAGC |
| | GGTTCAGCTCCTCTCTGCTGATCCTGCAGGTGCGGGAGGCAGACGCAGCCGTGTA |
| | CTATTGTGCCGTGGAGGATCTGAATCAGGCCGGCACAGCCCTGATTTTCGGCAAA |
| | GGAACAACCCTGAGCGTGAGCAGCGACATCCAGAACCCTGAGCCCGCCGTATACC |
| | AGCTGAAGGACCCCCGATCTCAGGATAGTACTCTGTGCCTGTTCACCGACTTTGA |
| | TAGTCAGATCAATGTGCCTAAAACCATGGAATCCGGAACTTTTATTACCGACAAG |
| | TGCGTGCTGGATATGAAAGCCATGGACAGTAAGTCAAACGGCGCCATCGCTTGGA |
| | GCAATCAGACATCCTTCACTTGCCAGGATATCTTCAAGGAGACCAACGCAACATA |
| | CCCATCCTCTGACGTGCCCTGTGATGCCACCCTGACAGAGAAGTCTTTCGAAACA |
| | GACATGAACCTGAATTTTCAGAATCTGAGCGTGATGGGCCTGAGAATCCTGCTGC |
| | TGAAGGTCGCTGGGTTTAATCTGCTGATGACACTGCGGCTGTGGTCCTCATAAAG |
| | CTTAATTGAGCGGCCGCGCTTTATTTGTGAAATTTGTGATGCTATTGCTTTATTT |
| | GTAACCATTATAAGCTGCAATAAACAAGTTAACAACAACAATTGCATTCATTTTA |
| | TGTTTCAGGTTCAGGGGGAGATGTGGGAGGTTTTTTAAAGCTCACCGATTTTGAT |
| | TCTCAAACAAATGTGTCACAAAGTAAGGATTCTGATGTGTATATCACAGACAAAA |
| | CTGTGCTAGACATGAGGTCTATGGACTTCAAGAGCAACAGTGCTGTGGCCTGGAG |
| | CAACAAATCTGACTTTGCATGTGCAAACGCCTTCAACAACAGCATTATTCCAGAA |
| | GACACCTTCTTCCCCAGCCCAGGTAAGGGCAGCTTTGGTGCCTTCGCAGGCTGTT |
| | TCCTTGCTTCAGGAATGGCCAGGTTCTGCCCAGAGCTCTGGTCAATGATGTCTAA |
| | AACTCCTCTGATTGGTGGTCTCGGCGCGGCCGCTACGTAGATAAGTAGCATGGCG |
| | GGTTAATCATTAACTACAAGGAACCCCTAGTGATGGAGTTGGCCACTCCCTCTCT |
| | GCGCGCTCGCTCGCTCACTGAGGCCGGGCGACCAAAGGTCGCCCGACGCCCGGGC |
| | TTTGCCCGGGCGGCCTCAGTGAGCGAGCGAGCGCGCCAGCTGGCGTAATAGCGAA |
| | GAGGCCCGCACCGATCGCCCTTCCCAACAGTTGCGCAGCCTGAATGGCGAATGGC |
| | GATTCCGTTGCAATGGCTGGCGGTAATATTGTTCTGGATATTACCAGCAAGGCCG |
| | ATAGTTTGAGTTCTTCTACTCAGGCAAGTGATGTTATTACTAATCAAAGAAGTAT |
| | TGCGACAACGGTTAATTTGCGTGATGGACAGACTCTTTTACTCGGTGGCCTCACT |
| | GATTATAAAAACACTTCTCAGGATTCTGGCGTACCGTTCCTGTCTAAAATCCCTT |
| | TAATCGGCCTCCTGTTTAGCTCCCGCTCTGATTCTAACGAGGAAAGCACGTTATA |
| | CGTGCTCGTCAAAGCAACCATAGTACGCGCCCTGTAGCGGCGCATTAAGCGCGGC |
| | GGGTGTGGTGGTTACGCGCAGCGTGACCGCTACACTTGCCAGCGCCCTAGCGCCC |
| | GCTCCTTTCGCTTTCTTCCCTTCCTTTCTCGCCACGTTCGCCGGCTTTCCCCGTC |
| | AAGCTCTAAATCGGGGGCTCCCTTTAGGGTTCCGATTTAGTGCTTTACGGCACCT |
| | CGACCCCAAAAAACTTGATTAGGGTGATGGTTCACGTAGTGGGCCATCGCCCTGA |
| | TAGACGGTTTTTCGCCCTTTGACGTTGGAGTCCACGTTCTTTAATAGTGGACTCT |
| | TGTTCCAAACTGGAACAACACTCAACCCTATCTCGGTCTATTCTTTTGATTTATA |
| | AGGGATTTTGCCGATTTCGGCCTATTGGTTAAAAAATGAGCTGATTTAACAAAAA |
| | TTTAACGCGAATTTTAACAAAATATTAACGTTTACAATTTAAATATTTGCTTATA |
| | CAATCTTCCTGTTTTTGGGGCTTTTCTGATTATCAACCGGGGTACATATGATTGA |
| | CATGCTAGTTTTACGATTACCGTTCATCGATTCTCTTGTTTGCTCCAGACTCTCA |
| | GGCAATGACCTGATAGCCTTTGTAGAGACCTCTCAAAAATAGCTACCCTCTCCGG |
| | CATGAATTTATCAGCTAGAACGGTTGAATATCATATTGATGGTGATTTGACTGTC |
| | TCCGGCCTTTCTCACCCGTTTGAATCTTTACCTACACATTACTCAGGCATTGCAT |
| | TTAAAATATATGAGGGTTCTAAAAATTTTTATCCTTGCGTTGAAATAAAGGCTTC |
| | TCCCGCAAAAGTATTACAGGGTCATAATGTTTTTGGTACAACCGATTTAGCTTTA |
| | TGCTCTGAGGCTTTATTGCTTAATTTTGCTAATTCTTTGCCTTGCCTGTATGATT |
| | TATTGGATGTTGGAATCGCCTGATGCGGTATTTTCTCCTTACGCATCTGTGCGGT |
| | ATTTCACACCGCATATGGTGCACTCTCAGTACAATCTGCTCTGATGCCGCATAGT |
| | TAAGCCAGCCCCGACACCCGCCAACACCCGCTGACGCGCCCTGACGGGCTTGTCT |
| | GCTCCCGGCATCCGQTTACAGACAAGCTGTGACCGTCTCCGGGAGCTGCATGTGT |
| | CAGAGGTTTTCACCGTCATCACCGAAACGCGCGAGACGAAAGGGCCTCGTGATAC |
| | GCCTATTTTTATAGGTTAATGTCATGATAATAATGGTTTCTTAGACGTCAGGTGG |
| | CACTTTTCGGGGAAATGTGCGCGGAACCCCTATTTGTTTATTTTTCTAAATACAT |
| | TCAAATATGTATCCGCTCATGAGACAATAACCCTGATAAATGCTTCAATAATATT |
| | GAAAAAGGAAGAGTATGAGTATTCAACATTTCCGTGTCGCCCTTATTCCCTTTTT |
| | TGCGGCATTTTGCCTTCCTGTTTTTGCTCACCCAGAAACGCTGGTGAAAGTAAAA |
| | GATGCTGAAGATCAGTTGGGTGCACGAGTGGGTTACATCGAACTGGATCTCAACA |
| | GCGGTAAGATCCTTGAGAGTTTTCGCCCCGAAGAACGTTTTCCAATGATGAGCAC |
| | TTTTAAAGTTCTGCTATGTGGCGCGGTATTATCCCGTATTGACGCCGGGCAAGAG |
| | CAACTCGGTCGCCGCATACACTATTCTCAGAATGACTTGGTTGAGTACTCACCAG |
| | TCACAGAAAAGCATCTTACGGATGGCATGACAGTAAGAGAATTATGCAGTGCTGC |
| | CATAACCATGAGTGATAACACTGCGGCCAACTTACTTCTGACAACGATCGGAGGA |
| | CCGAAGGAGCTAACCGCTTTTTTGCACAACATGGGGGATCATGTAACTCGCCTTG |
| | ATCGTTGGGAACCGGAGCTGAATGAAGCCATACCAAACGACGAGCGTGACACCAC |
| | GATGCCTGTAGCAATGGCAACAACGTTGCGCAAACTATTAACTGGCGAACTACTT |
| | ACTCTAGCTTCCCGGCAACAATTAATAGACTGGATGGAGGCGGATAAAGTTGCAG |
| | GACCACTTCTGCGCTCGGCCCTTCCGGCTGGCTGGTTTATTGCTGATAAATCTGG |
| | AGCCGGTGAGCGTGGGTCTCGCGGTATCATTGCAGCACTGGGGCCAGATGGTAAG |
| | CCCTCCCGTATCGTAGTTATCTACACGACGGGGAGTCAGGCAACTATGGATGAAC |
| | GAAATAGACAGATCGCTGAGATAGGTGCCTCACTGATTAAGCATTGGTAACTGTC |
| | AGACCAAGTTTACTCATATATACTTTAGATTGATTTAAAACTTCATTTTTAATTT |
| | AAAAGGATCTAGGTGAAGATCCTTTTTGATAATCTCATGACCAAAATCCCTTAAC |
| | GTGAGTTTTCGTTCCACTGAGCGTCAGACCCC |
| naked FRB | EMWHEGLEEASRLYFGERNVKGMFEVLEPLHAMMERGPQTLKETSFNQAYGRDLM |
| wild-type | EAQEWCRKYMKSGNVKDLTQAWDLYYHVFRRISK |
| polypeptide | |
| SEQ ID | |
| NO: 1450 | |
| FRB-CISC | GAGATGTGGCACGAGGGCCTGGAGGAGGCCAGCAGGCTGTATTTTGGCGAGCGCA |
| having a | ACGTGAAGGGCATGTTCGAGGTGCTGGAGCCTCTGCACGCCATGATGGAGAGAGG |
| intracellular | CCCACAGACCCTGAAGGAGACATCCTTTAACCAGGCCTATGGACGGGACCTGATG |
| IL2Rβ | GAGGCACAGGAGTGGTGCAGAAAGTACATGAAGTCTGGCAATGTGAAGGACCTGA |
| domain | CGCAGGCCTGGGATCTGTACTATCACGTGTTTCGGAGAATCTCCAAGGGCAAAGA |
| SEQ ID | CACGATTCCGTGGCTTGGGCATCTGCTCGTTGGGCTGAGTGGTGCGTTTGGTTTC |
| NO: 1451 | ATCATCTTGGTCTATCTCTTGATCAATTGCAGAAATACAGGCCCTTGGCTGAAAA |
| | AAGTGCTCAAGTGTAATACCCCCGACCCAAGCAAGTTCTTCTCCCAGCTTTCTTC |
| | AGAGCATGGAGGCGATGTGCAGAAATGGCTCTCTTCACCTTTTCCCTCCTCAAGT |
| | TTCTCCCCGGGAGGGCTGGCGCCCGAGATTTCACCTCTTGAGGTACTTGAACGAG |
| | ACAAGGTTACCCAACTTCTCCTTCAACAGGATAAGGTACCCGAACCTGCGAGCCT |
| | TAGCTCCAACCACTCTCTTACGAGCTGCTTCACCAATCAGGGATACTTCTTTTTC |
| | CACCTTCCCGATGCGCTGGAAATCGAAGCATGTCAAGTTTACTTTACCTATGATC |
| | CATATAGCGAGGAAGATCCCGACGAAGGAGTCGCCGGTGCGCCCACGGGTTCCTC |
| | ACCCCAACCTCTCCAGCCTCTCTCAGGAGAAGATGATGCTTATTGCACTTTTCCC |
| | AGTAGAGACGATCTCCTCCTCTTTTCTCCATCTCTTTTGGGGGGACCTTCCCCCC |
| | CTTCTACGGCACCTGGCGGGTCTGGTGCTGGCGAGGAGCGGATGCCGCCGTCCCT |
| | CCAGGAGCGAGTACCACGAGATTGGGATCCCCAGCCACTTGGACCACCAACTCCA |
| | GGCGTACCTGACCTTGTCGATTTTCAACCTCCCCCTGAATTGGTGCTGCGAGAGG |
| | CTGGGGAGGAAGTTCCGGACGCTGGGCCGAGGGAGGGCGTGTCCTTTCCATGGAG |
| | TAGGCCTCCAGGTCAAGGCGAGTTTAGGGCTCTCAACGCGCGGCTGCCGTTGAAT |
| | ACAGACGCTTATCTCTCACTGCAGGAACTGCAAGGTCAGGACCCAACACATCTTG |
| | TA |
| FRB | GAGATGTGGCACGAGGGCCTGGAGGAGGCCAGCAGGCTGTATTTTGGCGAGCGCA |
| domain of | ACGTGAAGGGCATGTTCGAGGTGCTGGAGCCTCTGCACGCCATGATGGAGAGAGG |
| polypeptide | CCCACAGACCCTGAAGGAGACATCCTTTAACCAGGCCTATGGACGGGACCTGATG |
| encoded by | GAGGCACAGGAGTGGTGCAGAAAGTACATGAAGTCTGGCAATGTGAAGGACCTGA |
| SEQ | CGCAGGCCTGGGATCTGTACTATCACGTGTTTCGGAGAATCTCCAAG |
| ID: 1451 | |
| SEQ ID | |
| NO: 1452 | |
| IL2Rβ | GGCAAAGACACG |
| domain of | |
| polypeptide | |
| encoded by | |
| SEQ | |
| ID: 1451 | |
| SEQ ID | |
| NO: 1453 | |
| Transmembrane | ATTCCGTGGCTTGGGCATCTGCTCGTTGGGCTGAGTGGTGCGTTTGGTTTCATCA |
| domain of | TCTTGGTCTATCTCTTGATC |
| polypeptide | |
| encoded by | |
| SEQ | |
| ID: 1451 | |
| SEQ ID | |
| NO: 1454 | |
| Intracellular | AATTGCAGAAATACAGGCCCTTGGCTGAAAAAAGTGCTCAAGTGTAATACCCCCG |
| domain of | ACCCAAGCAAGTTCTTCTCCCAGCTTTCTTCAGAGCATGGAGGCGATGTGCAGAA |
| polypeptide | ATGGCTCTCTTCACCTTTTCCCTCCTCAAGTTTCTCCCCGGGAGGGCTGGCGCCC |
| encoded by | GAGATTTCACCTCTTGAGGTACTTGAACGAGACAAGGTTACCCAACTTCTCCTTC |
| SEQ | AACAGGATAAGGTACCCGAACCTGCGAGCCTTAGCTCCAACCACTCTCTTACGAG |
| ID: 1451 | CTGCTTCACCAATCAGGGATACTTCTTTTTCCACCTTCCCGATGCGCTGGAAATC |
| SEQ ID | GAAGCATGTCAAGTTTACTTTACCTATGATCCATATAGCGAGGAAGATCCCGACG |
| NO: 1455 | AAGGAGTCGCCGGTGCGCCCACGGGTTCCTCACCCCAACCTCTCCAGCCTCTCTC |
| | AGGAGAAGATGATGCTTATTGCACTTTTCCCAGTAGAGACGATCTCCTCCTCTTT |
| | TCTCCATCTCTTTTGGGGGGACCTTCCCCCCCTTCTACGGCACCTGGCGGGTCTG |
| | GTGCTGGCGAGGAGCGGATGCCGCCGTCCCTCCAGGAGCGAGTACCACGAGATTG |
| | GGATCCCCAGCCACTTGGACCACCAACTCCAGGCGTACCTGACCTTGTCGATTTT |
| | CAACCTCCCCCTGAATTGGTGCTGCGAGAGGCTGGGGAGGAAGTTCCGGACGCTG |
| | GGCCGAGGGAGGGCGTGTCCTTTCCATGGAGTAGGCCTCCAGGTCAAGGCGAGTT |
| | TAGGGCTCTCAACGCGCGGCTGCCGTTGAATACAGACGCTTATCTCTCACTGCAG |
| | GAACTGCAAGGTCAGGACCCAACACATCTTGTA |

### Certain Embodiments for Suppressing Activation and/or Proliferation of a Population of Cells

[0553] Some embodiments of the methods and compositions provided herein include methods of suppressing activation and/or proliferation of a population of cells, such as polyclonal T cells. Some such methods include contacting the population of cells with a genetically modified CD4+ Treg cell; wherein the population of cells comprise an endogenous T cell receptor (TCR) specific for a first epitope of an antigen, and wherein the Treg cell comprises an exogenous TCR specific for a second epitope of the antigen. In some embodiments, the method provides administering to a subject one or more airT cells that express a TCR or CAR specific to an epitope of an antigen, wherein the subject comprises polyclonal T effector cells that express TCRs specific to one or more epitopes of the same antigen. In some embodiments, the administered airT cells express a TCR or CAR that binds an epitope of an antigen with lower affinity or avidity than one or more TCRs of the polyclonal T effector cell population. In some embodiments, the administered airT cells express a TCR or CAR that binds an epitope of an antigen with higher affinity or avidity than one or more TCRs of the polyclonal T effector cell population.

[0554] In some embodiments, compositions comprising cells, and methods are provided of suppressing a population of cells in a subject, which population of cells comprises an endogenous TCR. In some embodiments, this endogenous TCR is specific for a first epitope of an antigen. Contemplated herein is a cell (e.g., an engineered T cell) that comprises an exogenous TCR specific for a second epitope of the antigen. In some embodiments, a method as contemplated herein comprises administering to a subject a composition comprising cells (e.g., engineered Treg cells) that comprises an exogenous TCR specific for a second epitope of the antigen.

[0555] As used herein, “avidity” can refer to a functional activity induced by an interaction between a TCR expressed on a T cell with an antigen, such as a MHC Class II-peptide complex comprising an antigen on an antigen presenting cell. In some embodiment, a relative avidity of a first TCR to an antigen can include the level of proliferation induced by a first cell expressing the first TCR when the first TCR binds to the antigen compared to the level of proliferation induced by a second cell expressing a second TCR when the second TCR binds to the antigen. In some embodiments, a dose response curve and the measurement of proliferation as shown in FIG. 156A, panel A can be utilized to determine relative avidity. There are multiple ways to assess TCR avidity for a MHC-peptide complex. In some embodiments, a functional definition of avidity can be based on the proliferative response of a T cell expressing the TCR of interest when co-cultured with an antigen presenting cell. In some embodiments, the antigen presenting cell and T cell are autologous. In some embodiments, proliferation is measured with dye dilution at 4-6 days. In some embodiments, proliferation is measured with H3-Thymidine incorporation. In some embodiments, proliferation is measured with expression of Ki67. In some embodiments, avidity is determined by comparison to an established TCR known to be of high avidity. In some embodiments, a panel of TCR is used, generated from responses to known pathogens or autoantigens.

[0556] In some embodiments, the exogenous TCR has an increased avidity for the antigen compared to an additional or second TCR specific for the antigen. In some embodiment, a relative avidity of a first TCR to an antigen can include the level of activation and/or proliferation induced by a first cell expressing the first TCR when the first TCR binds to the antigen compared to the level of proliferation induced by a second cell expressing a second TCR when the second TCR binds to the antigen. In some embodiments, methods for determining relative avidity include determining relative functional avidity. Some such methods can include methods disclosed in Viganó S., et al., (2012) Journal of Immunology Research Article ID 153863, 14 pages, 2012 which is incorporated by reference in it is entirety. In some embodiments, functional avidity relates to a proliferative response of a T cell expressing the TCR of interest when co-cultured with an antigen presenting cell. Proliferation can be measured in multiple ways including dye dilution at 4-6 days, H³ thymidine incorporation or expression of Ki67. Such assays can be performed using a range of peptide concentrations. Relative avidity can be determined by comparison to an established TCR known to be of high avidity, such as a panel of TCR generated from responses to known pathogens or autoantigens. For example, a T1D5-2 TCR specific to IGRP has higher avidity for its cognate epitope, IGRP₃₀₅₋₃₂₄, than a T1D4 TCR that is also specific to IGRP, but has the cognate epitope IGRP₂₄₁₋₂₆₀. In some embodiments, a cell expressing an exogenous TCR proliferates 10% to 1,000%, 20% to 500%, 50% to 400%, or 100% to 200% more than a cell expressing an endogenous TCR specific to an epitope of the same antigen. In some embodiments, a cell expressing an exogenous TCR proliferates 10% or more, 20% or more, 30% or more, 40% or more, 50% or more, 60% or more, 70% or more, 80% or more, 90% or more, 100% or more, 150% or more, 200% or more, 250% or more, 300% or more, 350% or more, 400% or more, or 500% or more than a cell expressing an endogenous TCR specific to an epitope of the same antigen. In some embodiments, a cell expressing an exogenous TCR expresses 10% to 1,000%, 20% to 500%, 50% to 400%, or 100% to 200% more of a a cytokine than a cell expressing an endogenous TCR specific to an epitope of the same antigen. In some embodiments, a cell expressing an exogenous TCR expresses 10% or more, 20% or more, 30% or more, 40% or more, 50% or more, 60% or more, 70% or more, 80% or more, 90% or more, 100% or more, 150% or more, 200% or more, 250% or more, 300% or more, 350% or more, 400% or more, or 500% or more of a cytokine than a cell expressing an endogenous TCR specific to an epitope of the same antigen.

[0557] In some embodiments, the exogenous TCR has a reduced avidity for the antigen compared to an additional or second TCR specific for the antigen. In some embodiments, a cell expressing an exogenous TCR proliferates 0% to 2%, 2% to 5%, 5% to 10%, 10% to 20%, 20% to 30%, 30% to 40%, 40% to 50%, 50% to 60%, 60% to 70%, 70% to 80%, 80% to 90%, or 90% to 99% as much as a cell expressing an endogenous or second TCR specific to a different epitope of the same antigen. In some embodiments, a cell expressing an exogenous TCR proliferates 99% or less, 95% or less, 90% or less, 80% or less, 75% or less, 70% or less, 60% or less, 50% or less, 40% or less, 30% or less, 20% or less, or 10% or less than a cell expressing an endogenous or second TCR specific to a different epitope of the same antigen. In some embodiments, a cell expressing an exogenous TCR expresses 0% to 2%, 2% to 5%, 5% to 10%, 10% to 20%, 20% to 30%, 30% to 40%, 40% to 50%, 50% to 60%, 60% to 70%, 70% to 80%, 80% to 90%, or 90% to 99% as much of a cytokine as a cell expressing an endogenous or second TCR specific to a different epitope of the same antigen. In some embodiments, a cell expressing an exogenous TCR expresses 99% or less, 95% or less, 90% or less, 80% or less, 75% or less, 70% or less, 60% or less, 50% or less, 40% or less, 30% or less, 20% or less, or 10% or less of a cytokine than a cell expressing an endogenous or second TCR specific to a different epitope of the same antigen.

[0558] In some embodiments, the population of cells comprises CD4+ CD25− T cells. In some embodiments, the exogenous TCR is specific for a type I diabetes antigen. In some embodiments, the exogenous TCR is specific for a type I diabetes antigen selected from IGRP, GAD65, or PPI. In some embodiments, the exogenous TCR is selected from T1D2, T1D4, T1D5-1, T1D5-2, 4.13, GAD113, or PPI76. In some embodiments, the exogenous TCR comprises T1D5-2. In some embodiments, the population of cells are contacted with the genetically modified Treg cell in the presence of an antigen presenting cell and the antigen. In some embodiments, the Treg cell is obtained by introducing into a cell a vector comprising a nucleic acid encoding the exogenous TCR. In some embodiments, the Treg cell is a mammalian cell. In some embodiments, the Treg cell is a human cell. In some embodiments, the Treg cell is a T regulatory type 1 (Tr1) cell. In some embodiments, the Treg cell is a FOXP3+ Treg cell. In some embodiments, the Treg cell expresses CTLA-4, LAG-3, CD25, CD39, neuropilin-1, galectin-1, and/or IL-2Ra on its surface. In some embodiments, the cell is obtained from peripheral blood. In some embodiments, the cell is obtained from umbilical cord blood. In some embodiments, the cell is an allogeneic cell. In some embodiments, the cell is an autologous cell.

[0559] This application is based, at least in part, on the realization that (1) the suppression phenotype of engineered Treg cells to suppress a polyclonal population of Teff cells is different compared to its phenotype to suppress Teff cells that are transduced to encode specific TCRs; and (2) Tregs with low avidity TCRs are better able to suppress a polyclonal population of Teff cells.

[0560] Accordingly, provided herein are methods of preparing a composition of engineered Treg cells wherein the Treg cells suppress a population of polyclonal T effector cells. In some embodiments, a method of preparing a composition of engineered Treg cells able to suppress a population of polyclonal T effector cells comprises (a) contacting the population of Teff cells with a genetically modified CD4+ Treg cell, wherein the population of cells comprise an endogenous T cell receptor (TCR) specific for a first epitope of an antigen, and the Treg cell comprises an exogenous TCR specific for a second epitope of the antigen, and (b) measuring the effect of the Treg cells on the proliferation of the Teff cells as a measure of the suppressive activity of the Treg cells. In some embodiments, the Treg cells and the Teff cells are contacted in the presence of an antigen presenting cell and the antigen. See e.g., FIG. 154, panel A.

[0561] Provided herein is a population of T effector (Teff) cells that can be used to identify engineered Treg cells on the basis of their ability to suppress Teff cells. In some embodiments, Teff cells used to identify Treg cells that can suppress a polyclonal population of Teff cells are prepared by a method comprising: (a) isolating CD4+CD25− T cells from PBMC (e.g., from type 1 diabetes, T1D subjects), and (b) culturing the T cells in the presence of a pool or two or more (e.g., 1, 2, 3, 4, 5, 6, 7, 8, 9, 10, or more than 10) antigen specific peptides (e.g., islet-specific peptides) for a period of time (e.g., 1-30 days, 2-20 days, 5-15 days, 8-15 days, 10-15, days, or 12-15 days). In some embodiments, cultured Teff cells can be tested for their polyclonality using a tetramer staining assay in which specific antigens are loaded on tetramers before binding to cells (see e.g., FIG. 153, panel C)

[0562] Provided herein is a composition of engineered Treg cells capable of suppressing a population of polyclonal T effector cells. In some embodiments, an engineered Treg capable of suppressing a population of polyclonal T effector cells has TCR with a low functional avidity. In some embodiments, the avidity of a TCR is measured by the % proliferation of the cell expressing it in response to the antigen to which the TCR is specific (cognate antigen). See e.g., FIG. 156A, panels A and B, and FIG. 156B. In some embodiments, the functional avidity of a TCR is low if the % proliferation of the cell expressing the TCR in response to contact with at least 1 μg/mL (e.g., 1 μg/mL, 2 μg/mL, 3 μg/mL, 4 μg/mL, or 5 μg/mL) of antigen is less than 50% (e.g., less than 50%, less than 40%, less than 30%, less than 20%, or less than 10%). In some embodiments, functional avidity is defined as the antigen dose that is needed to trigger a T-cell response and can be measured by determining the level/s of cytokine production (e.g., IFN production) or cytotoxic activity or proliferation. In some embodiments, the functional avidity of a TCR is expressed as the concentration needed to induce a half-maximum response (EC50). It is influenced by the affinity of the TCR for the pMHC-complex, (b) expression levels of the TCR and (c) the distribution and composition of signaling molecules, and (c) expression levels of molecules that attenuate T-cell function and TCR signaling. See e.g., Vigano S., et al. Journal of Immunology Research, vol. 2012, Article ID 153863, 14 pages, 2012 which is incorporated by reference in its entirety. Accordingly, in some embodiments, a Treg capable of suppressing a population of polyclonal T effector cells has a low affinity for the pMHC-complex. Affinity of TCR and pMHC complex can be measured using techniques such as surface plasmon resonance and expressed in terms of an equilibrium dissociation constant Kd. The lower the Kd, the higher the affinity. In some embodiments, avidity of a TCR is a measure is associated with a particular TCR expressed on a cell. In some embodiments, avidity of a TCR is a measure associated with a cell rather than a TCR expressing it because other factors, as discussed above, affect the avidity of a TCR. In some embodiments, avidity of a TCR is a measure associated with a population of cells as the heterogeneity in a population of cells can affect the avidity. In some embodiments, the exogenous TCR expressed by an engineered Treg cell has a binding affinity for an epitope on a target antigen with a binding affinity that is at least 1.5, 2.0, 2.5, 3.0, 3.5, 4.0, 4.5, 5.0, 6.0, 7.0, 8.0, 9.0, or 10.0 times lower than the binding affinity of an endogenous TCR expressed by a T effector cell in vivo.

[0563] Non-limiting examples of low avidity TCRs include, specific for IGRP and GAD65 that may be useful for treating T1D, are T1D2, T1D4, T1D5-1, T1D5-2, 4.13, GAD113, and PPI76 as described in the Examples herein.

[0564] Provided herein is a method of treating a disease or condition in a subject comprising administering to the subject a composition comprising Treg cells expressing a TCR specific to the disease or condition and capable of suppressing a polyclonal population of Teff cells.

### EXAMPLES

### Example 1—Generation of airT cells

[0565] A platform was developed to generate stable engineered Treg (edTregs; airT) by converting conventional human CD4 T cells into Treg-like cells through Foxp3 gene editing (FIG. 1A, FIG. 1B, FIG. 1C, FIG. 2). This platform included the use of lentiviral TCR gene transfer to generate antigen-specific edTregs.

[0566] Antigen-specific T cells were identified by activating PBMC with a peptide pool, followed by assessment of CD154 expression. This method utilized single cell RNA-seq for identifying TCR clonotypes expanded in TID subjects and was used to generate full TCR sequences (Cerosaletti et al. 2017 J. Immunol. PMID: 28566371). Based on islet-specific TCR sequences identified from this study, lentiviral TCR constructs for TCR gene transfer were generated. These TCR constructs express human TCR variable regions from islet-specific TCRs and mouse TCR constant regions allowing improved pairing between the transduced human TCR chains (FIG. 5). Islet-specific TCR expression was validated by T cell proliferation assays using the TCR cognate peptides (or irrelevant peptides) with antigen presenting cells (APCs). T cells transduced with islet-specific TCRs proliferated only in response to their cognate peptides and APC (FIG. 6).

[0567] To generate antigen-specific airT cells, Foxp3 locus was edited in CD4+ T cells that had been transduced with islet-TCRs, which resulted in the successful generation of airT cells expressing islet-specific TCRs. airT expressing islet-specific TCR exhibited a Treg phenotype: CD25+, CD127−, CTLA4+, ICOS+(FIG. 7). Notably, airT expressing islet-specific TCRs show antigen-specific and bystander suppressive function by in vitro suppression assays (FIGS. 7-11). AirT cells also inhibited production of inflammatory cytokines such as TNF, IFN-g, IL-17 or IL-2 by T_{eff} cells in an airT-antigen-specific manner (FIG. 11).

[0568] Treg phenotype, generation efficacy, and suppressive capacity of airT was investigated in comparison to expanded nTreg. airT cells could be generated up to 3 times of input number of PBMC, while the number of nTreg cells after 10 days of expansion was only 14% of the input cells. airT cells also exhibited a phenotype similar to nTreg, but showed higher expression of Foxp3, CTLA-4 and ICOS as compared to nTreg (FIG. 3).

[0569] Notably, airT had similar or superior in vitro suppressive activity on effector T cell proliferation to expanded nTreg (FIG. 4).

### Example 2—Antigen-Specific Human T Cells Adopt a Treg Phenotype after FOXP3 Editing and are Immunosuppressive In Vitro

[0570] As an alternative approach to generate antigen-specific FOXP3-edited CD4+ T cells, methods were developed to isolate, edit, and expand antigen-specific effector T cells from healthy subjects or individuals with autoimmune disease. To investigate feasibility of FOXP3 editing in association with expansion of antigen-specific human T cells, CD4+ T cells from HLA DRB1*0401 human donors were expanded in the presence of influenza (flu) and tetanus antigens prior to gene editing. Following the editing procedure, the cells were further expanded in the antigen cocktail for 4 to 7 days. At this time, the average editing rate (GFP+) was 28±2.1% (FIG. 12). Antigen-specific cells were purified by FACS after labelling with a mixture of PE-conjugated flu and tetanus MHC-II tetramers. These tetramer-positive airT (Tmr+airT) recapitulated the immunophenotype of activated tTreg for canonical markers of regulatory T cells: upregulating expression of FOXP3, CD25, CTLA4, and Helios; and suppressing IL-2 production, unlike Tmr+ Mock cells analyzed in parallel (FIG. 13A). Tmr+airT were able to suppress polyclonal activated autologous CD4+ T_{eff} in vitro, unlike the Tmr+Mock cells, indicating immunosuppressive function (FIG. 13B). These results demonstrate that CD4+ T cells from human peripheral blood can be enriched for target antigen specificity by tetramer-based flow sorting and modified by gene-editing to impart tTreg-like phenotypic and suppressive properties that retain antigen specificity.

[0571] These methods were further developed to enrich for antigen-specific T cells by stimulating T cells with model antigens (MP, HA, and TT). After around 2 weeks of expansion, cells were stained with tetramers to identify antigen-specific T cells, and then the FoxP3 locus was edited (FIG. 14). Using this method, antigen-specific Tregs were generated, and these airT cells exhibited in vitro suppressive activity in antigen-specific manner (FIG. 15). In addition, islet-specific T cells were enriched by peptide stimulation method using a pool of islet-specific peptides and islet-specific T cells of multiple specificities were isolated by tetramer staining. Again, islet-specific airT cells were generated by Foxp3 gene editing in these cells (FIG. 16, FIG. 17).

### Example 3—Bi-Allelic HDR Editing for the Generation of Dual-Edited Human CD4+ T Cells

[0572] FIG. 18, FIG. 19 and FIG. 110 summarize experimental approaches used to demonstrate the ability to introduce two separate expression cassettes into the human TRAC locus (FIG. 18), as well as the constructs used in these studies (FIG. 19).

[0573] Using a CRISPR-based approach, the efficacy of four novel gRNAs targeting the first exon of human TRAC locus was tested for induction of full TCR knockout (FIG. 20). Sequences for the four gRNAs are listed in TABLE 2.

TABLE 2

| gRNA | SEQ ID NO: | Sequence |
|---|---|---|
| gRNA_1 | SEQ ID | TCTCTCAGCTGGTACACGGC |
| (human TRAC | NO: 1405 | |
| editing) | | |
| gRNA_2 | SEQ ID | TGGATTTAGAGTCTCTCAGC |
| (human TRAC | NO: 1428 | |
| editing) | | |
| gRNA_3 | SEQ ID | CTCTCAGCTGGTACACGGCA |
| (human TRAC | NO:1429 | |
| editing) | | |
| gRNA_4 | SEQ ID | GAGAATCAAAATCGGTGAAT |
| (human TRAC | NO: 1406 | |
| editing) | | |

[0574] CD3 expression was evaluated using flow cytometry 48 hr after RNP delivery and demonstrated 96.8% and 84.7% CD3 knockout using gRNA_1 and gRNA_4, respectively (FIG. 21). On-target site-specific activity was measured by ICE (Inference of CRISPR Edits) and confirmed specific indel induction for gRNA_1 and gRNA_4 in TRAC relative to predicted off-target sites (FIG. 22). Next, to test the specificity of the novel guides, the top three off-target sites for each gRNA (as predicted based on bioinformatics looking at the most similar sequences in the human genome) were assessed. These were then directly analyzed in human T cells via amplification of the off-target site from T cells transfected with the nuclease. The amplicons were sequenced and analyzed by ICE program. The level of cleavage activity observed for the candidate off-target sites was 0% cleavage. In contrast, on-target site activity in the same assay was 78% for gRNA_1 and 66% for gRNA_4 at the target TRAC site (FIG. 23). This illustrates that these novel donor templates are highly-specific for the TRAC locus.

[0575] Next, the ability to dual edit human CD4+ T cells was tested using constructs that allow easy tracking of successfully edited cells. MND-GFP and MND-BFP cassettes were generated, flanked by identical 300 bp homology arms matched to TRAC gRNA_1 or gRNA_4 (FIG. 24A), and were used to test the ability to generate biallelic TRAC edited T cells with stable expression of both GFP and BFP. The timeline for cell expansion, editing and analysis is shown in FIG. 24B and the resulting FACS analysis demonstrated 20.3% and 10.6% BFP/GFP double-positive cells using gRNA_1 and gRNA_4, respectively, confirming successful integration of both repair cassettes after induction of a single double strand break (FIG. 25).

[0576] In order to obtain sufficient numbers of cells for therapeutic use, it may be useful, in some contexts, to selectively expand engineered cells in vitro. To do this in the context of dual-edited cells, split IL-2 CISC HDR knock-in constructs were generated for enrichment and selection. The method of using IL-2 CISC components has been described for the enrichment of edited CD4+ T-cells in the presence of rapamycin or a heterodimerizing rapamycin homolog, AP21967 (rapalog). See e.g., FIG. 108. In such methods, FRB-IL2RB and FKBP-IL2RG components were contained in the same cassette to select for single integration events.

[0577] For these studies, FRB-IL2RB and FKBP-IL2RG components were split into two separate cassettes, one containing GFP and the other containing mCherry, to allow for selection of two independent integrations. Constructs are shown in FIG. 26 and the timeline and editing conditions for this experiment are shown in FIG. 27. Although the initial dual editing rate with these constructs was 1.44% double positive GFP/mCherry cells, potentially due to the increased HDR template size, FIG. 28, dual edited cells could be significantly enriched-for using rapalog. In the presence of 100 nM rapalog treatment, GFP/mCherry double positive cells increased from 1.4% to 9% over 8 days (FIG. 29). Importantly, GFP single-positive, mCherry single-positive and double-negative cells percentages remained the same in the presence of rapalog, suggesting that expansion only takes place when a functional IL-2 CISC protein is present through dual expression of FRB-IL2RB and FKBP-IL2RG. As expected, no expansion was observed in the presence of IL-2 (FIG. 30).

[0578] The reproducibility between experiments and variance between donors was tested (FIG. 31). Cells from the same donor from the previous experiment (shown in FIG. 29) were edited and compared with cells from an additional male, Caucasian donor of similar age. The percent dual editing of R003657 donor was 1.1%, which is similar to what was observed previously (FIG. 29). Bi-allelic editing of the second donor, R003471, was 6.4%. Overall, the editing rate changed between donors, but the ratio between GFP-positive, mCherry-positive and double-positive cells remained similar, suggesting variability may be based on how well the donor can be edited. Importantly, dual-edited cells from both donors were successfully enriched-for in the presence of Rapalog, yielding 13.8% and 28.5% GFP/mCherry double-positive cells for donors R003657 and R003471, respectively (FIG. 32).

[0579] The results of these studies suggested that incorporation of the split IL-2 CISC in dual HDR editing provides a means of efficient selection and enrichment of dual-edited cells and could provide a method to obtain edited cell numbers necessary for therapeutic use.

[0580] In view of the successful bi-allelic editing using MND-eGFP-FRB-IL2RB and MND-mCherry-FKBP-IL2RG cassettes, and enrichment of dual-edited cells using Rapalog, constructs were generated to introduce FoxP3 and a pancreatic islet antigen-specific TCR (T1D4) in combination with the IL-2 CISC components to generate antigen-specific Foxp3+ airT cells (FIG. 33).

### Example 4—Bi-Allelic Targeting for the Generation of Dual Edited Murine CD4+ T-Cells

[0581] In order to perform studies to assess the efficacy of Ag-specific FoxP3 airT in animal models of diabetes or other autoimmune conditions, analogous tools for editing into the murine Trac locus were generated. Three novel gRNA target sequences within the first exon of murine Trac locus were selected and tested for CD3 knockout in mouse (C57/B6) CD4+ primary T cells (FIG. 34). FIG. 35 shows that mTrac_gRNA_2 resulted in the best knock-out of 87.8%, as measured by flow analysis of mCD3 expression following 2-days post transfection. As with the human construct, MND-GFP and MND-BFP constructs were generated to enable convenient tracking of edited cells. The construct and timeline for this experiment is shown in FIG. 36. As was the case with dual-editing human cells at the TRAC locus, the dual editing efficiency in murine cells was relatively low (1.97%) (FIG. 37).

### Example 5: airT Function in an Antigen-Specific Murine Model of Multiple Sclerosis

[0582] In order to investigate airT function in an antigen-specific in vivo setting, T cells for editing were selected from myelin oligodendrocyte glycoprotein peptide fragment 35-55 (MOG)-specific TCR-transgenic mice (C57B1/6-Tg(Tcra2D2,Tcrb2D2)1Kuch, abbreviated 2D2. MOG challenge of 2D2 transgenic mice leads to experimental autoimmune encephalomyelitis (EAE), a mouse model of multiple sclerosis. EAE in 2D2 mice is not controlled by endogenous 2D2 tTreg present within the central nervous system (CNS), possibly due to high levels of inflammatory cytokines produced by pathogenic T_{eff}. Adoptive transfer of antigen-specific 2D2 airT may suppress T_{eff} expansion in the periphery before these activated effectors migrate to the CNS (FIG. 38). To test this hypothesis, TALEN and AAV donor template reagents were designed that would mimic closely the GFP knock-in editing strategy used to generate the GFP+ human airT. After improved procedures for murine T cell stimulation and mRNA electroporation were designed, murine T cells were transfected with mRNA encoding TALEN pairs specific for the first coding exon of mouse Foxp3. Seven to 9 days post-transduction, approximately 80% of alleles contained indels based on colony sequencing of PCR-amplified gDNA (FIG. 39) indicating efficient target site cleavage. An AAV donor template was cloned that substituted mouse Foxp3 homology arms for the human sequences used in the previous HDR experiments; homology was proximal to, but not overlapping with, the mouse TALEN binding sites. With slight modifications of the conditions used for human CD4+ T cell editing, including using AAV5 capsid for donor template transduction, editing rates of approximately 25-30% (GFP+ cells) were consistently achieved using 2D2 mCD4+ T cells isolated from spleen and lymph nodes (LNs). GFP+ cells were phenotypically FOXP3+ CD25+ CTLA-4 (FIG. 40). CD4+ T cells were also isolated from 2D2neg littermate (C57BL/6) and edited, resulting in airT with a polyclonal pool of TCR specificities for comparison with 2D2 airT. Next, 3.0×10⁴ CD4+ T_{eff} cells from 2D2 mice, along with 3.0×10⁴ mock or airT, were adoptively transferred into lymphopenic RagI−/− mice. Recipient mice were challenged with MOG35-55 peptide in adjuvant followed by pertussis toxin to disrupt the blood-brain barrier. FIG. 41 shows the experimental timeline of cell transfer, immunization, and cell analysis. In this model, recipient animals develop symptoms of EAE (drooping tail progressing to tail, and then hind limb, paralysis) beginning at approximately 7-10 days post cell transfer. To assess effector T cell priming, recipient mice were euthanized at day 7 post-transfer and inguinal and axillary LNs were collected. The percentage of LN CD45+ CD4+ T cells were 2-fold lower in recipient of antigen-specific 2D2 airT compared to recipients of mock-edited cells, and 1.7-fold lower compared with recipients of polyclonal C57B1/6 airT. The absolute number of CD4+ CD45+ T cells was markedly reduced in both airT cohorts relative to the mock control, with 2D2 airT and C57B1/6 airT having 49-fold fewer and 18-fold fewer CD4+ CD45+ T cells, respectively. In all cohorts, the majority of CD45+ CD4+ cells were GFP−, and fewer GFP− T cells from mice receiving 2D2 edTreg expressed inflammatory markers CD25 and IFN-γ (FIG. 42). To determine if the observed effect was due to reduced T_{eff} proliferation, a subset of animals were injected with the thymidine analog 5-ethynyl-2′-deoxyuridine (EdU) 2 hours prior to sacrifice and its incorporation into gDNA was detected after a “click” reaction by flow cytometry (FIG. 43). 2D2 airT reduced the overall percentage of GFP− cells that had incorporated EdU by 22% and 18% relative to groups treated with mock or polyclonal airT, respectively. Importantly, GFP+ cells from 2D2 airT (˜25%) and, to a lesser extent, from C57B1/6 airT (˜10%) recipient cohorts incorporated EdU, consistent with the ability of tTreg to proliferate in vivo in response to self-antigen-stimulation. These combined findings show that murine airT function in vivo to restrain pathogenic T_{eff} priming and that antigen-specific airT exhibit greater activity and expansion in comparison with polyclonal airT.

### Example 6: airT Function in an Antigen-Specific Murine Model of Type 1 Diabetes (T1D)

[0583] To investigate the efficacy of antigen-specific airT cells in an in vivo model of autoimmune T1D, a BDC2.5NOD-NSG adoptive transfer model was used as a tool to determine if Foxp3-edited antigen specific T cells could delay or reverse the onset of disease. NOD mice: (NOD/ShiLtJ strain) were used as a polygenic model for autoimmune Type 1 Diabetes (T1D). In this model, onset of diabetes is marked by moderate glycosuria and by a non-fasting plasma glucose higher than 250 mg/dl. Diabetic mice are hypoinsulinemic and hyperglucagonemic, indicating a selective destruction of pancreatic islet beta cells. It is currently the most widely used polyclonal autoimmune animal model to study spontaneous T1D. BDC2.5NOD mice: [NOD.Cg-Tg(TcraBDC2.5,TcrbBDC2.5)1Doi/DoiJ] carry both rearranged TCR alpha and beta genes from the cytotoxic CD4+ T cell clone BDC-2.5. Mature T cells in these mice express only the BDC2.5 TCR. On the NOD background, mice carrying the transgenes have a reduced incidence of diabetes relative to NOD/ShiLtJ controls. However, following transfer of CD4+CD25− BDC-2.5 T cells into immunodeficient recipient mice, recipient mice will quickly develop overt diabetes. In previous published studies, nTregs from antigen-specific BDC2.5NOD mice effectively prevent and reverse autoimmune diabetes in NOD mice relative to the nTregs from polyclonal WT NOD mice. Thus, in these experiments, these animal models were utilized as a tool to determine if Foxp3-edited antigen-specific T cells could delay or reverse the onset of autoimmune TID compared to nTregs from WT NOD. The ability to generate airT in NOD mice was tested. Previous studies demonstrate the ability to generate airT cells in murine CD4+ T cells from B6 mice using HDR editing of the Foxp3 locus (WO 2018/080541 and US 2019/0247443 which are each incorporated by reference in its entirety). Here, these studies were expanded and show that the same AAV donor templates have similar NHEJ and HDR efficiency in NOD murine CD4+ T cells (FIG. 44). Importantly, the Foxp3-edited BDC2.5NOD CD4+ T cells have a Treg phenotype expressing increased Foxp3, and less inflammatory cytokines as compared to mock cells (FIG. 45).

[0584] Antigen-specific airT cell function in an NSG adoptive transfer model may be more efficacious than non-antigen specific airT cells at delaying or reversing the onset of autoimmune T1D. nTregs were included in this study as this population has previously been shown to reduce the onset of T1D. The experimental design and the phenotype of the input T_{eff}, airT and nTreg cells are shown in FIG. 46. Like nTreg, airT lead to a reduction in percentage of diabetes compared to mock airT or animals receiving T_{eff} only (FIG. 47). Importantly, administration of BDC airT leads to a statistically significant decrease in percentage diabetes compared to polyclonal NOD airT. This finding demonstrates that Ag-specific airT more effectively prevent diabetes development compared with polyclonal airT. Of note, previous studies have shown that the N-terminal GFP-FOXP3 fusion protein functions as a hypomorph and can actually accelerate autoimmune diabetes within the immunocompetent NOD background. Consistent with this idea, while antigen-specific nTregs performed better than antigen-specific airT in these studies, a significant suppressive effect was still observed with airT expressing GFP-FOXP3 fusion protein. Testing the airT expressing FOXP3 without the N-terminal GFP fusion (including airT cells expressing a clinically relevant cis-linked LNGFR selectable marker; see below), an improved protective effect would be expected.

[0585] Taken together, these findings clearly showed that in the BDC2.5 NOD T cell into NSG adoptive transfer model, Ag-specific airT function to prevent diabetes development as compared with polyclonal airT.

### Example 7: Engineering AAV Donor Template Design to Generate airT Product with LNGFR Selectable Marker

[0586] The ability to enrich murine cells following editing is important for generating sufficient numbers of edited cells to perform in vivo experiments without sorting. To address this, a cis-linked LNGFR selectable marker has been developed for use in purification of murine edTeg products. FIG. 48 shows the design of repair templates used in murine Foxp3 editing. Each template contains a LNGF.P2A knock-in (ki) but varies in terms of the promoter. In addition, the presence and absence of 07UCOE was tested with MND promoter. Following transfection of RNP+AAV5 #1331 (MND-GFP), #3189 (MND-LNGFR), and #3227 (PGK-LNGFR) in B6 CD4+ T cells, the editing efficiency of GFP and LNGFR KI was very similar (FIG. 49, FIG. 50). In addition, an 8.7-fold enrichment of LNGFR+ cells was demonstrated using an anti-LNGFR microbeads and magnetic field separation (FIG. 51). These data suggest LNGFR can successfully be used as a selection and enrichment method of murine CD4+ T cells.

### Example 8—Methods

### Foxp3 Editing

[0587] CD4+ T cells were isolated from PBMCs using MACS CD4+ T cell isolation kit and activated with CD3/CD28 activator beads (1:1, bead to cell ratio) and IL-2, IL-7, and IL-15. Beads were removed after 48 hr activation and cells were rested for another 16-24 hr. For Foxp3 editing using Cas9/CRISPR, cells were transfected by electroporation with RNP complex combined with Cas9 and guide RNA and then transduced with AAV template (AAV FOXP3 ex1.MND-LNGFRki). For Foxp3 editing using TALEN nuclease, cells were transfected by electroporation with TALEN RNA targeting FOXP3, followed by transduction with AAV template (AAV FOXP3 ex1.MND-GFPki). Cells were expanded in media with IL-2 after editing.

### Generation of airT Cells with Islet-TCR

[0588] CD4+ T cells were isolated from PBMCs and activated with CD3/CD28 activator beads and IL-2, IL-7, and IL-15. Transduction with lentiviral vectors encoding GAD65 or IGRP specific TCRs (4.13, T1D2, T1D4, T1D5-1, or T1D5-2) was performed at MOI 10 with protamine sulfate after 24 hr activation. Beads were removed after total 48 hr incubation from the initial activation. Cells were rested for another 16-24 hr and then edited. For Foxp3 editing, cells were electroporated with RNP complex combined with Cas9 and guide RNA and then transduced with AAV FOXP3 ex1.MND-LNGFRki template. Cells were expanded in media with IL-2 after editing and editing rate and TCR-transduction were measured 3-4 days after editing. airT cells were enriched by LNGFR expression using MACSelect LNGFR beads, aliquoted, and frozen down for future experiments.

### Generation of Antigen-Specific airT Cells

[0589] For generating T cells specific for Flu or Tetanus, CD4+CD25− cells were isolated from PBMCs and co-cultured with APC (irradiated autologous CD4−CD25+ cells) and MP, HA, and TT peptides in the presence of IL-2. CD4+ T cells were stimulated twice with peptides and APC for 9 days and then activated with CD3/CD28 beads for Foxp3 editing using TALEN and AAV FOXP3 ex1.MND-GFPki template. 3 days after editing, GFP+ cells were sorted by flow and expanded with CD3/CD28 beads. Beads were removed after 7 days expansion and airT cells were harvested for suppression assay after another 4 days incubation.

[0590] For generating islet-specific T cells by peptide stimulation, CD4+CD25− cells were isolated from PBMCs and co-cultured with APC and a pool of islet-specific antigens (total 9 peptides from IGRP, GAD65, and PPI). After 2 weeks of expansion, cells were harvested and stained with tetramers specific for 9 islet peptides for sorting. Sorted islet-specific CD4+ T cells were activated with CD3/CD28 activator beads for Foxp3 editing using Cas9/CRISPR and AAV FOXP3 ex1.MND-LNGFRki template. Cells were stained by tetramers and analyzed by flow 3 days after editing.

[0591] Certain nucleic acid sequences useful with embodiments provided herein are listed in the TABLE depicted in FIG. 145.

### Example 9—Comparison of airT with T Cells Expressing Lentiviral (LV)-Delivered FOXP3

[0592] LV transfer of a FOXP3 cDNA expression cassette into conventional T cells has been shown to confer a Treg-like phenotype and suppressive characteristics in vitro and in vivo (Allan et al. Mol Ther 16:194-202 (2008); Passerini et al. Sci Transl Med 5:215ra174 (2013)). As a comparison for the presently disclosed editing strategy, a LV construct was generated to deliver a cDNA encoding the same GFP-FOXP3 fusion protein made by the airT cells (FIG. 52A). The gene editing and viral transduction procedures produced similar proportions of GFP+FOXP3+ cells (FIG. 52A). LV-treated cells (LV Treg) had an average of 3.0 lentiviral copies per GFP+ cell genome; airT have only one targeted insertion per cell in this experiment, edited T cells from male donors. Despite their copy number differences, the MFI of GFP+ cells were consistently lower in LV Treg than in airT (FIG. 52B), consistent with more efficient expression from a genomic vs. cDNA context, or LV integration in transcriptionally less permissive loci. Both methods of enforcing FOXP3 expression skewed the T_{eff} towards tTreg phenotypes, including upregulation of CD25, CTLA-4, and Helios, and down-regulation of IL-2, TNF-α, and IFN-γ (FIG. 52C). Except for FOXP3, the percentage of cells expressing regulatory T cell markers, as well as the mean expression (as assessed by MFI) per cell, were similar between airT and LV Treg. airT and LV Treg exhibited a similar ability to suppress polyclonal T_{eff} proliferation in vitro (FIG. 52D). Importantly, however, FACs purified LV Treg cells lost GFP expression over 5 weeks in culture compared to airT (FIG. 52E; starting % GFP+ >99% for both). This latter finding demonstrates that HDR editing more effectively maintains high-level FOXP3 expression compared with LV delivery using the identical promoter construct. These findings are unexpected based upon previous reports using LV delivery of FOXP3 and support the concept that HDR editing of the FOXP3 locus provide a more stable platform for sustained expression of FOXP3 in CD4 T cells.

### Example 10—Dual-Editing Strategies

[0593] FIG. 53 provides an overview of the HDR gene-editing strategies developed to generate antigen-specific airT via HDR-editing-only approaches. These novel approaches eliminated the requirement for use of LV for TCR delivery and are designed to generate airT that concurrently: a) lack endogenous TCR expression; b) express an islet-specific T1D (or another disease-relevant, antigen-specific TCR); and c) can be enriched in vitro and in vivo using the novel CISC/DISC IL-2 platform. As shown in FIG. 53, strategies were developed to achieve the above goals by either targeting a single locus (TRAC) or two-loci (TRAC and FOXP3). Successful application of both of these strategies is illustrated below.

[0594] FIG. 54 provides a schematic overview and construct number designation for each of the AAV HDR donor constructs used in the studies described below for either single and two locus dual-editing approaches for generation of Ag-specific edTreg; with or without IL2-CISC/DISC selection capacity.

### Dual Editing of Human CD4+ T Cells—Examples of Single Locus Approach

[0595] FIG. 55 and FIG. 56 relate to reproducibility between experiments and variance between donors. Two donors were edited with AAV #3207 (MNID.GFP.FRB-IL2RG) and #3208 (MNID.mCherry.FKBP-IL2RG), used in previous experiments and compared the repeat experiments to the original data. In these experiments, both HDR repair templates are targeted to a single sgRNA cut site within the first exon of the TRAC locus. The percent dual-editing (incorporation of both the GFP and mCherry split-CISC cassettes in a single cell) of donor R003657 was 2.75% (FIG. 55) which is similar to results observed in two prior data sets (1.44% and 1.1% for donor R003657). Percent dual-editing of the second donor (R003471) was 6.78% (FIG. 56), also similar to the 6.4% observed in the original data set. Both donors were male, Caucasian of similar age. Overall, the editing rate varied between donors, but each donor had similar editing rates between experiments, suggesting that variability is based on how well the donor can be edited and not the between different experiments of the same donor. Importantly, using edited T cells derived from both human donors, dual-edited cells were successfully enriched in the presence of a heterodimer-inducing rapamycin analog (Rapalog, AP21967) to a similar level to what was previously observed. This study yielded 44.7% and 46.1% GFP/mCherry double positive cells for donors R003657 and R003471 respectively after 7 days of Rapalog enrichment (FIG. 55, FIG. 56). As expected, there was no enrichment in the presence of IL-2.

[0596] The results of these studies demonstrate that incorporation of the IL-2 split-CISC in dual HDR editing strategies provides a means of efficient selection and enrichment of dual edited cells which is reproducible between donors and repeat experiments. Following successful dual editing using the MND.GFP.FRB.IL2RB (#3207) and MND.mCherry.FKBP.IL2RG (#3208) cassettes, and enrichment of dual edited cells using Rapalog, constructs were generated that can be used in introducing HA tagged FOXP3 and a pancreatic islet antigen-specific TCR (T1D4) in combination with the IL-2 CISC components (#3240 and 3243 respectively) to generate antigen-specific FOXP3+ edTreg cells (FIG. 57).

[0597] After replacing GFP with T1D4 and mCherry with HA-tagged FOXP3, respectively, the MND.HA.FOXP3.FKBP.IL2RG (#3240) and MND.T1D4.FRB.IL2RB (#3243) constructs were used to test the initial editing rates and expansion of FOXP3 expressing T1D4 positive human edTregs. Constructs are shown in FIG. 57(A) and the timeline and editing conditions for this experiment are shown in FIG. 57(B). Despite lower initial editing rate compared with using the GFP/mCherry-CISC constructs (FIG. 55, FIG. 56), 2.75% and 6.37% double-positive GFP/mCherry cells versus 0.65% double-positive FOXP3/T1D4 cells, (FIG. 57), the double-positive FOXP3/T1D4 cells could be significantly enriched. In the presence of Rapalog, FOXP3/T1D4-positive cells enriched from 0.65% to 11% after 8 days of treatment compared to 1.1% with IL-2 treatment (FIG. 57(C)). The reduction of initial editing rate with these constructs compared to the Split-CISC constructs containing GFP and mCherry (#3207 and #3208) could potentially be due to the increased size of the T1D4 HDR template. MND.T1D4.FRB.IL2RB (#3243) is 4.3kb, which was significantly larger than MND.mCherry.FKBP.IL2RB (#3208) at 2.7kb.

[0598] In order to obtain sufficient numbers of edited cells for therapeutic use, it may be important to increase the rate of editing and/or enrichment of FOXP3/TCR dual-positive cells. To improve upon initial editing rates, conditions were modified by varying the serum concentration during the editing phase. FIG. 58 and FIG. 59 show results from a dual-editing experiments using AAV constructs MND.HA.FOXP3.FKBP.IL2RG (#3240) and MND.T1D4.FRB.IL2RB (#3243) comparing four different concentrations of serum during the editing phase of human CD4+ T cells. The resulting FACS analysis demonstrates an improvement of initial editing rate from 1.8% with 20% FBS to 3.96%-4.75% in lower or no serum (FIG. 58). Importantly, the resulting enrichment was nearly 10-fold in cells which recovered in 2.5% FBS, increasing from 1.8% to 17.6% double-positive cells in 7 days of Rapalog treatment, compared to 1.97% with IL-2 treatment (FIG. 59).

[0599] In summary, FIGS. 55-59 demonstrate the capacity to achieve efficient levels of dual-HDR editing at the TRAC locus leading to generation of antigen-specific airT that exhibit enrichment using the IL-2 CISC platform.

### Dual Editing of Human CD4+ T Cells—Examples of Two Loci Approach

[0600] As an alternative dual-editing strategy for generating antigen-specific airT product containing IL-2 CISC components, constructs targeting to the TRAC and FOXP3 loci were developed for two-locus editing. As shown in schematic on FIG. 53, instead of having two constructs targeted to the TRAC locus, one construct is targeted to TRAC locus and the other is targeted to FOXP3 locus. This approach might lead to an improved dual-editing rate and also permit coordinated use of multiple existing strategies to mediate sustained FOXP3 expression. To test this, constructs were developed that would allow easy tracking of successfully edited cells. MND.mCherry.FKBP.IL2RG (#3251) and MIND.GFP.FKB.IL2RB (#3207) cassettes with FOXP3 and TRAC homology arms, respectively, were used to test the ability to generate dual-edited cells with stable expression of both mCherry and GFP linked to the IL-2 CISC. The constructs used and time line for editing, cell expansion and analysis are shown in FIG. 60. For this experiment, high serum and low serum editing conditions were compared since the single-loci editing suggested that lower serum concentrations resulted in higher dual editing rates (FIG. 58). The resulting FACS analysis demonstrates successful editing using the two-loci strategy with both serum conditions (FIG. 61). As with the single-locus editing, 2.5% serum media during the editing phase significantly improved dual editing at day 3 (4.99% editing rate with 20% serum vs 11.0% with 2.5% serum). The cells edited in 2.5% serum containing medium were then expanded with either IL2 or Rapalog (AP21967) for 10 days. FIG. 62 shows the robust enrichment in the presence of Rapalog for a total of 59% mCherry/GFP double-positive cells.

[0601] The reproducibility between experiments was tested and alternative editing conditions were explored in an attempt to further increase the initial editing rates. FIG. 63 outlines editing conditions and the time-line for editing, cell expansion and analysis. For this experiment, 2.5% serum containing medium was used in the editing phase for all conditions. The percentage virus by volume was varied in the reaction and editing was compared using AAV #3207 and #3251 in the presence and absence of an HDR enhancer (HDR-E). FIG. 64 shows histograms from flow data in each condition 3 days post editing. The editing rate with 2.5% serum containing medium was similar in this study compared to the prior experiment shown in FIG. 61 (15.4% double-positive GFP/mCherry cells compared 11% double-positive cells respectively). In addition, Rapalog enrichment of the dual-edited population resulted in 54% GFP/mCherry double-positive cells (FIG. 65), similar to previous data and demonstrating reproducibility between experiments. Although the presence of HDR-E did not affect the initial editing rate, the % virus in the reaction did impact editing outcomes (FIG. 64). The results showed that 10% culture volume of each virus was optimal compared to 15% each, or any of the other combinations with a total of 30% virus.

[0602] The results of these studies demonstrate that presently disclosed two-loci dual-editing strategies can be used to introduce the IL-2 split-CISC cassette and lead to efficient enrichment of dual-edited cells using Rapalog. Having been successful using this approach for generation and enrichment of dual-edited cells, constructs were designed and cloned for expression of FOXP3 and a pancreatic islet antigen-specific TCR (T1D4) in combination with IL-2 CISC components by targeting the FOXP3 and TRAC loci, respectively. These and a range of other HDR donors are used to generate antigen-specific FOXP3 airTcells (FIG. 66).

### In-Frame TRAC Knock-In as a Dual-Editing Strategy

[0603] As an additional modification/improvement in our dual-editing strategies, methods were established for in-frame knock-in of a promoter-less TCR cassette including components of the IL-2 CISC, by targeting the first exon of the TRAC locus (FIG. 67). This editing strategy drives expression of the antigen-specific TCR via the promoter/enhancer activity of the endogenous TRAC locus. Advantages of this approach include elimination of endogenous TCR expression (and the potential for improper pairing with delivered TCR components) and concomitant near-endogenous levels of autoantigen-specific TCR expression. To establish this approach, gene editing and exogenous gene expression were tested with a proof-of-concept mCherry IL-2 CISC-containing construct (#3253) (FIG. 68). 63.8% of cells were mCherry-positive with concomitant loss of CD3 (down from 99.9% in AAV-only to 3.01% in P2A.mCherry.FRB.IL2RB (#3253) edited cells). Following gene-editing, mCherry expression was easily detected by flow cytometry. As expected, the MFI of mCherry expression in P2A.mCherry.FRB.IL2RB (#3253) edited cells was lower compared to mCherry expression in T cells edited in the same locus using MND promoter expression cassette (MND.mCherry.FKBP.IL2RG (#3208) FIG. 69). Thus, this HDR approach successfully permitted transgene expression via the promoter/enhancer activity of the endogenous TRAC locus.

[0604] In follow-up studies, two distinct HDR donor cassettes are used to achieve dual-editing of TRAC (and capture of the endogenous promoter) and/or editing of both the TRAC and FOXP3 loci. HDR donors introduce split components of the IL-2 CISC to permit enrichment of dual-edited cells in parallel with delivery of the Ag-specific TCR (under TRAC promoter) and FOXP3 expression via cDNA expression or via locking on expression of endogenous FOXP3. Two-loci dual editing is tested using mCherry Split CISC with endogenous TRAC promoter (P2A.mCherry.FRB.IL2RB (#3253)) paired with MND.GFP.FKBP.IL2RG (#3273) for editing into the FOXP3 locus. Expression of the two components of the IL-2 split-CISC from two distinct promoters may affect overall CISC function, so single-locus dual editing is also tested using P2A.mCherry.FRB.IL2RB (#3253) and P2A.GFP.FKBP.IL2RG (#3292) to drive both components of the IL-2 CISC off the endogenous TRAC promoter (FIG. 70).

[0605] Following successful bi-allelic editing (using one or both promoter-less mCherry/GFP constructs and enrichment of dual edited cells using Rapalog), constructs are generated that can be used to introduce FOXP3 and antigen-specific TCR (T1D4) in combination with the IL-2 CISC components as an alternative approach to generate antigen-specific FOXP3+ airT cells. (See FIG. 70). airT generated using these strategies are compared to cells wherein the antigen-specific TCR is driven by the exogenous MND promoter.

### Dual Editing Using Decoy-CISC (Split-DISC) Constructs

[0606] Although CISC-expressing cells expand efficiently in the presence of a heterodimerizing Rapalog (AP21967), the FDA-approved drug, Rapamycin, may be preferred for clinical application. Intracellular binding of Rapamycin to its target mTOR has well-documented inhibitory effects on T-cell proliferation. Constructs and methods to address this problem by utilizing a naked “decoy” FRB domain expressed intracellularly in CISC-expressing cells are disclosed in WO2019210057, which is incorporated by reference in its entirety. Constructs that express the naked FRB domain along with the CISC are designated as “decoy-CISC,” or “DISC.”

[0607] To determine if the DISC would work with dual editing approach, CISC containing constructs were modified to include an additional naked FRB domain located 3′ of the CISC receptor (FIG. 70, FIG. 71). Constructs with the additional FRB domain along with the CISC components are designated as “decoy-CISC or “DISC”. When utilized in a dual-editing approach, constructs are designated as split-DISC. Using the split-DISC, the naked FRB domain competed with the endogenous FRB domain of mTOR for binding to Rapamycin, thereby resulting in Rapamycin-mediated signaling through the split-CISC components without the associated inhibition of cell growth.

[0608] As shown in FIG. 71, T cells dual-edited with the mCherry CISC construct containing the added FRB domain (mCherry DISC, #3280) and the GFP CISC construct (#3207), expressed 7.07% double-positive GFP/mCherry cells. As predicted with the DISC construct, the double-positive GFP/mCherry cells enriched to a similar level following treatment with either Rapamycin or Rapalog (AP21967) (79.5% and 86.4% respectively) (FIG. 72).

[0609] Experiments are performed to determine the in vivo enrichment/engraftment of GFP/mCherry-split-DISC edited cells in NSG mice treated with Rapamycin. Dual-edited GFP/mCherry cells exhibit increased engraftment/enrichment in vivo. These studies are expanded using FOXP3− and T1D4-containing constructs to evaluate engraftment and expansion of islet-specific airT in vivo. The DISC construct (MND.FOXP3.FKBP.IL2RG.FRB, #3262) shown in FIG. 73 is paired with existing #3243 MND.T1D4.FRB.IL2RB for dual-editing into the TRAC locus for development of islet-specific airT that can be enriched in vivo using Rapamycin.

### Example 11—In Vitro and In Vivo Functional Activities of Ag-Specific Murine airT In Vitro Characterization of Murine airT Products

[0610] Studies designed to identify advantageous HDR donor template designs for generating airT products from murine CD4+ T cells with a suppressive Treg-like phenotype were performed. Questions addressed by these studies included: a) which of the tested promoter/enhancer constructs provided the best airT performance in vitro and, ultimately, in vivo and b) whether use of the clinically relevant cis-linked selectable marker LNGFR allowed for enrichment of airT in a manner suitable to GMP manufacturing. FIG. 74 to FIG. 80 show results from experiments that (1) evaluated the use of the clinically relevant cis-linked selectable marker LNGFR as a method to enrich murine cells following editing; (2) tested a variety of candidate promoters (in addition to MND promoter); (3) tested two Foxp3 homology arms of different size in the donor templates; and (4) compared donor templates with and without the UCOE element (as a potential means to limit silencing of an introduced promoter within the Foxp3 locus).

[0611] First, the effect of extending the homology arm of MND.LNGFR.P2A donor template from 0.6 kb to 1.0 kb of the Foxp3 gene on editing efficiency in C57BL/6 mouse CD4+ T cells was evaluated (FIG. 76). These studies indicate that MND.LNGFR.P2A #3261, encompassing a 1.0 kb arm, has a slightly higher editing efficiency compared to MND.LNGFR.P2A #3189, which contains a 0.6 kb arm. The improvement is ˜10%, and the increase in editing efficiency was reproducible between experiments, which enabled selection of AAV #3261 as a desirable targeted donor template for MND.LNGFR.P2A airT murine cells in the remaining studies. Also tested was the editing efficiency and purity following enrichment of C57BL/6 edTreg using AAV donor templates with alternative promoters (FIG. 76). This demonstrated that the overall editing and purity of LNGFR+ enriched cells were similar between AAV donor templates containing MND, PGK and EF-1a promoters. In addition, the purity following enrichment of LNGFR+ cells and GFP+ cells were comparable, further demonstrating that LNGFR can be used as a selection and enrichment method of murine CD4+ T cells.

[0612] Although the editing efficiency and purity of edited cells using AAV donor templates with different promoters was similar, importantly, the level of FOXP3 expression varied depending the promoter. FIG. 77 shows evaluation of GFP and FOXP3 expression in Mock-edited, MND.GFP.KI- (#1331) and PGK.GFP.KI- (#3209) in C57BL/6-edited CD4+ T cells. The results showed that FOXP3 MFI was significantly higher in cells edited using MND.GFP.KI (#1331) compared to PGK.GFP.KI (#3209). The level of FOXP3 expression in PGK.GFP.KI- (#3209) edited CD4+ cells was similar to FOXP3 expression observed in splenic nTregs. These studies demonstrated the ability to introduce alternative promoters into the endogenous Foxp3 locus to control the overall level of FOXP3 in airT products. This may provide flexibility in product generation and may lead to airT with different functional properties. The relationship between FOXP3 expression level and in vitro and in vivo function was further explored in studies described in FIG. 79 and FIG. 85 (see below). The ability of Ubiquitous Chromatin Opening Element (UCOE) to stabilize FOXP3 expression was also tested (FIG. 77). This element can function to reduce silencing and limit potential negative impacts of promoter elements. These studies showed that FOXP3 was stable with or without UCOE and that inclusion of the UCOE element did not negatively impact the relative FOXP3 expression level (MND.GFP.KI #1331 compared with MND.GFP.KI with UCOE #3213), suggesting that UCOE shielded donor works effectively and inclusion of this element may be useful in airT products as it might protect expression in vivo or over time, providing improving duration of functional activity.

[0613] Additional studies were performed to assess: (a) the functional activity of LNGFR− expressing airT cells in vitro; and (b) determine if the promoter driving endogenous FOXP3 expression manifested any impact on Treg functional activity. An in vitro suppression assay outlined in FIG. 78 was utilized to analyze T_{eff} cell proliferation in the presence and absence of sorted MND.GFP.KI- and MND.LNGFR.P2A- airTs; these effects were compared to the activity of purified murine nTreg. The results shown in FIG. 79 demonstrated that murine airT (generated with the MND.GFP.KI or MND.LNGFR.P2A HDR donors) and nTregs exhibited comparable, robust in vitro suppressive function. These findings also demonstrated that airT cells expressing the LNGFR selectable marker (MND.LNGFR.P2A #3261) can be successfully used as a selection and enhancement method of murine CD4+ cells without a loss in functional activity and are useful for modeling in vitro and in vivo functional activity of human airT products that utilize the same clinically relevant selection marker.

[0614] Using the same in vitro suppression assay, the functional activity of different strength promoters was explored to determine if FOXP3 expression levels (evaluated in FIG. 77) correlated with functional activity. FIG. 80 shows a comparison of LNGFR constructs utilizing the MND, PGK and EF-1a promoters (MND.LNGFR.P2A, PGK.LNGFR.P2A and EF-1a.LNGFR.P2A respectively) with MND.GFP.KI C57BL/6 edited CD4+ T cells and nTreg. The results showed that murine airT with MND promoter exhibited suppressive function that was comparable to nTreg. In contrast to the MND promoter constructs, airT cells utilizing the PGK promoter exhibited only partial in vitro suppressive function and airT utilizing the EF-1a promoter failed to suppress. Interestingly, although the PGK.GFP.KI-edited cells expressed FOXP3 levels similar to nTregs (FIG. 77), the in vitro suppressive activity of nTreg was significantly greater than PGK.LNGFR.P2A edited cells. These findings suggested the surprising result that a threshold level of FOXP3 expression in edited CD4+ T cells may be necessary to provide proper reprogramming and effective in vitro functional activity. The results described below also clearly demonstrate that the MND promoter was effective for reducing diabetes in vivo.

### In Vivo Functional Characterization of edTreg Products

[0615] The experiments summarized above suggest that murine airT cells containing a clinically relevant cis-linked LNGFR selectable marker retained functional activity in vitro and that the MND promotor had superior in vitro suppressive activity compared to alternative promoters. These studies were expanded to evaluate islet-specific airT product in an NSG adoptive transfer diabetes model where transfer of islet-specific NOD (murine) CD4+T cells into adult recipient NSG mice triggers rapid onset of diabetes.

[0616] Using this model, islet-specific MND.LNGFR.P2A airT derived from NOD BDC2.5 mice were evaluated for the ability to delay or prevent diabetes development. Although the in vitro experiments described in FIGS. 76-80 utilize cells enriched via cell sorting, the sorting process is both time-consuming and costly. In addition, sorting may well impact the engraftment and/or survival of cells post-adoptive transfer in vivo. To enable efficient enrichment of murine gene-edited airT that can be used in vivo, the purification and functional activity of airT purified using alternative methods was compared: (1) LNGFR+ cell enrichment through cell sorting by flow cytometer and (2) LNGFR+ cell enrichment using LNGFR column separation. FIGS. 82-83 show the flow plots prior to and post-purification using sorting and column enrichment. Although purification using the sorting method yielded an enriched population of LNGFR+ cells, the column enrichment produced ˜84% pure cell population with a significant savings in time and resources. Importantly, both the column-enriched LNGFR+ airT and sorted cells delayed or prevented the onset of diabetes (FIG. 84).

[0617] Together, the data in FIG. 82 to FIG. 84 demonstrated the capacity to generate highly purified islet-specific edited cells using LNGFR column separation and by FACS sorting. Both products expressed high levels of LNGFR/FOXP3 and showed Treg-like phenotypes by reducing or preventing diabetes in vivo.

[0618] Finally, FIG. 85 shows that functional activity of islet-specific airT products in the NSG adoptive transfer model varied depending on the promoter used to drive endogenous FOXP3. Cells edited with MND.GFP.KI and nTregs both delayed the onset or prevented diabetes, but PGK.GFP.KI airT did not. This result was consistent with the in vitro suppression data shown in FIG. 80 suggesting that selection of the promoter played a role in optimal function. Importantly, consistent with protection from diabetes, islet-specific airT cells homed to the pancreas and persisted in the NSG model with stable FOXP3 expression (FIG. 86).

[0619] These data demonstrated the capacity to engineer mouse airT from T_{eff} cells for in vitro and in vivo studies. Consistent with the findings in human T cells, the MND promoter effectively converted mouse T_{eff} into airT cells with high levels of FOXP3 expression and robust in vitro suppressive activity comparable with nTreg. Importantly, murine islet-specific MND airT and nTreg: (1) exhibited comparable, robust in vitro suppressive function; (2) blocked diabetes triggered by islet-specific T_{eff} in recipient mice. Moreover, the data showed that (3) airT cells expressing the LNGFR selectable marker can be enriched in vitro without a loss in functional activity and can function in vivo and (4) MND airT outperformed airT generated with alternative promoters, including PGK and EF1A, demonstrating that choice of the promoter played a role in improved function.

[0620] The NSG adoptive transfer diabetes model described permitted rapid assessment of key functional features of murine airT including: LN trafficking, expansion, activation status, and the capacity to limit initial T_{eff} activation. These approaches were used to compare the functional activity of antigen-specific, LNGFR enriched airT in an immunocompetent NOD mouse model of T1D.

### Editing at the Rosa26 Locus for Generating Murine T Cells Edited Cells

[0621] To expand the tool set for assessing the efficacy of Ag-specific FOXP3 airT in animal models of diabetes or other autoimmune conditions, gRNA targeting the murine Rosa26 locus were designed and tested. This well-characterized safe harbor locus has historically been used for stable expression of integrated transgenes in mouse models. Two novel gRNA target sequences within an intronic region of Rosa26, proximal to published gRNA target sites, were selected and on-target site-specific activity measured by ICE (Inference of CRISPR Edits) after RNP delivery to primary mouse CD4+ T-cells. ICE confirmed specific indel induction for R26_gRNA_1 in Rosa26 (FIG. 87).

[0622] Next, the ability to edit murine T cells using constructs that would allow easy tracking of successfully edited cells was tested. A MND-GFP cassette was generated flanked by identical 300 base pair Rosa26 homology arms matched to R26_gRNA_1 (#3245) and was used to generate Rosa26 edited T cells with stable expression of GFP. The timeline for cell expansion, editing and analysis is shown in FIG. 88. The resulting FACS analysis demonstrates 11.4% GFP high cells with AAV #3245 plus RNP compared to 0.02% with AAV #3245 alone 3 days post-edit, confirming successful integration of MND-GFP repair cassette into the Rosa26 locus (FIG. 89). FACS analysis carried at 8 days post-editing showed a similar percent of GFP+ cells (10.8%), indicating that the GFP expression is stable (FIG. 90).

[0623] Having achieved editing murine T cells at the Rosa26 locus using the MND-GFP cassette, repair templates containing mFoxp3 CDS with LNGFR marker (for purification) and alternative candidate promoters (in addition to MND promoter) are developed to generate further constructs with stable expression of FOXP3 in this safe harbor locus in mouse cells (FIG. 91). These constructs are used to explore dual editing in mouse cells for the generation of murine antigen-specific FOXP3-expressing airT for use in mouse autoimmune models. Mutant FOXP3 variants are tested that are predicted to have increased stability. This includes the 4× CDK phosphorylation mutant, where a set of 4 target residues for cyclin-dependent kinase phosphorylation have been replaced with alanine, blocking phosphorylation events that have been linked to protein degradation.

[0624] These data demonstrate that the Rosa26 safe harbor locus can be used for HDR editing in mouse T cells. This advance permitted dual-editing studies of mouse T cells paralleling work in human T cells, facilitating nonclinical animal modeling of Ag-specific airT.

### Developing Tools for Expansion of Murine Cells Using CISC Elements

[0625] An important feature of a human antigen-specific airT platform is the potential to expand airT in vitro and in vivo using, as an example, the IL-2-CISC system. To assess the function of airT containing the IL-2-CISC cassette in immune competent animal disease models, experiments were performed to test whether the human IL-2R sequence containing CISC/DISC cassette can promote selective expansion of murine cells in vitro and in vivo with Rapalog/Rapamycin. These data demonstrated proof-of-concept using a lentiviral construct, #1272, that contained a MND promoter-driven mCherry reporter and cis-linked human IL-2 CISC elements. FIG. 92 shows the schematic of the lentiviral cassette and the timeline of T cell transduction, expansion and analysis. In this study, transduced cells were placed in either: (a) IL-2, IL-7 and IL-15; (b) Rapalog alone; or (c) Rapalog plus an additional CD3/CD28 bead stimulation 2 days after transduction. FIG. 93 demonstrates mCherry expression in 8.85% of the transduced cells and further enrichment after 3 days of Rapalog treatment. Enrichment was greatest (46.1%) when transduced T cells that were concurrently treated with both Rapalog and an additional CD3/CD28 bead stimulation.

[0626] These data show that murine CD4+ T cells can be enriched using the IL-2 CISC technology and that human CISC is functional in the mouse system. These findings demonstrate the feasibility of studies to examine enrichment and function of murine Ag-specific airT using the split-CISC/Split-DISC approach in non-clinical animal models, where one cassette is integrated into a first locus of the genome, and another cassette is integrated into a second, different locus of the genome.

### Example 12 Generation and Testing of Antigen-Specific edTreg

### RA Antigen-Specific TCRs Identified from RA Patients

[0627] RA antigen-specific TCRs were identified from T cells clones isolated from RA patients. Based on these sequences, lentiviral TCR constructs for TCR gene transfer were generated. TABLE 3 lists generated lentiviral constructs encoding RA antigen-specific TCRs, their epitope specificity, and HLA-restriction. Target T cell epitope sequences included citrulline modifications. TCRs recognizing citrullinated -vimentin, -aggrecan, -CILP, and enolase were identified from T cell clones that were previously isolated from RA patients

TABLE 3

| TCR | | | Target | SEQ ID | HLA- |
|---|---|---|---|---|---|
| name | Antigen | Epitope | sequence | NO | DR |
| Vim418 | vimentin | 418-431 | SSLNL | SEQ ID | *0404 |
| | | | (Cit)E | NO: 1408 | |
| | | | TNLDSL | | |
| Agg153 | aggrecan | 153-168 | IVFHY | SEQ ID | *0404 |
| | | | (Cit) | NO: 1409 | |
| | | | AIST | | |
| | | | (Cit) | | |
| | | | YTLDF | | |
| Agg520 | aggrecan | 520-539 | GYEQC | SEQ ID | *0401 |
| | | | DAGWL | NO: 1410 | |
| | | | (Cit) | | |
| | | | DQTV | | |
| | | | (Cit) | | |
| | | | YPIV | | |
| Agg553 | aggrecan | 553-570 | PGV(Cit) | SEQ ID | *0401 |
| | | | TYGV | NO: 1411 | |
| | | | (Cit) | | |
| | | | PSTET | | |
| | | | YDVY | | |
| Agg621 | aggrecan | 621-637 | KCYAG | SEQ ID | *0401 |
| | | | WLADG | NO: 1412 | |
| | | | SL(Cit) | | |
| | | | YPIV | | |
| CILP297- | CILP | 297-311 | ATIKA | SEQ ID | *0401 |
| 1 | | | EFV | NO: 1413 | |
| | | | (Cit) | | |
| | | | AETP | | |
| | | | YM | | |
| CILP297- | CILP | 297-311 | ATIKA | SEQ ID | *0401 |
| 2 | | | EFV | NO: 1414 | |
| | | | (Cit) | | |
| | | | AETPYM | | |
| Enol326 | enolase | 326-340 | K(Cit) | SEQ ID | *0401 |
| | | | IAKA | NO: 1415 | |
| | | | VNEK | | |
| | | | SCNCL | | |

[0628] CD4+ T cells were isolated, activated with CD3/CD28 beads, and transduced with lentiviral RA Ag-specific TCRs. Flow plots show mTCRb expression gated on CD4+ cells day 9 post-transduction (FIG. 117A). CD4+ T cells transduced with RA Ag-specific TCRs were labeled with CTV and co-cultured with APC (irradiated PBMC) and their cognate peptide or DMSO for 3 days. Flow plots show cell proliferation as CTV dilution (FIG. 117B). RA-specific TCR expression was validated by T cell proliferation assays using peptides cognate with the TCRs and antigen presenting cells (APCs). T cells transduced with RA-specific TCRs (vimentin, aggrecan, CILP and enolase) proliferated in response to their cognate peptides and APC.

### Suppressive Activity of Enolase-Specific edTreg

[0629] Antigen-specific Treg were generated by editing the Foxp3 locus in CD4 T cells that had been transduced with enolase TCRs. This resulted in the successful generation of enolase-specific edTreg. FIG. 118A depicts flow plots of mTCRb expression and LNGFR/Foxp3 expression in edited cells without LV transduction (Untd Edited) and edited cells expressing Enol326-TCR (Enol326 Edited) on day 7. edTreg cells were enriched by LNGFR expression on day 10 and LNGFR− cells were used as mock cells for suppression assays. The transduced Enol326-TCR had a specificity for an epitope of Enolase 326-340.

[0630] FIG. 118B depicts a polyclonal suppression assay and an antigen-specific suppressing assay using enolase-specific edTreg. Enolase-specific Teff cells were produced from LV Enol326-TCR transduction of CD4+ T cells and expanded for 15 days. For the polyclonal assay, Enol326 Teff were incubated with anti-CD3/CD28 beads at 1:30 of bead to cell ratio with no Treg, untd edTreg, Enol326 edTreg, or mock cells. For the antigen-specific suppression assay, Enol326 Teff cells were co-cultured with APCs and Enol326 peptide in the presence of no Treg, untransduced (untd) edTreg, Enol326 edTreg, or mock cells. For all the suppression assay set up, Teff and edTreg or mock cells were labeled with CTV and EF670, respectively and co-cultured at 1:1 ratio. 4 days after the co-culture, cells were stained and analyzed for Teff proliferation as dilution of CTV. FIG. 118C depicts a graph of percentage suppression of Teff proliferation by no Treg, untd edTreg, Enol edTreg, or mock in the presence of a-CD3/CD28 (black) or APC and enolase peptide (grey) calculated from percentage proliferation in FIG. 118B. The enolase-specific edTregs showed antigen-specific and polyclonal suppressive function of antigen-specific T effector cells by in vitro suppression assays.

### Suppressive Activity of CILP-Specific edTreg

[0631] Suppressive activity of CILP-specific edTreg was determined. FIG. 119A depicts flow plots of mTCRb expression in untransduced edTreg and CILP297-1 edTreg gated on LNGFR+ Foxp3+ in edited cells transduced with no LV and LV CILP297-1-TCR, respectively. The CILP297-1 TCR had a specificity to a CILP297-311 epitope. FIG. 119B depicts a polyclonal suppression assay and an antigen-specific suppressing assay using CILP-specific edTreg. CILP-specific Teff cells were produced from LV CILP297-1-TCR transduction of CD4+ T cells and expanded for 15 days. For the polyclonal assay, CILP Teff were incubated with anti-CD3/CD28 beads with no Treg, untd edTreg, CILP edTreg, or mock cells. For the antigen-specific suppression assay, CILP Teff cells were co-cultured with APCs and CILP297 peptide in the presence of no Treg, untd edTreg, CILP edTreg, or mock cells. FIG. 119C depicts a graph of percentage suppression of CILP Teff proliferation by no Treg, untd edTreg, CILP edTreg, or mock in the presence of a-CD3/CD28 (black) or APC and CILP peptide (grey) calculated from percentage proliferation in FIG. 119B. Similar results were seen using CILP-specific edTregs. The CILP-specific edTregs showed antigen-specific and polyclonal suppressive function of antigen-specific T effector cells by in vitro suppression assays.

### Suppressive Activity of Vimentin-Specific edTreg

[0632] Suppressive activity of vimentin-specific edTreg was determined. FIG. 120A depicts flow plots of mTCRb expression in untransduced edTreg and Vim418 edTreg gated on LNGFR+ Foxp3+ in edited cells transduced with no LV and LV Vim418-TCR, respectively. The Vim418 TCR had a specificity to the epitope vimentin 418-431.

[0633] FIG. 120B depicts a polyclonal suppression assay and an antigen-specific suppressing assay using vimentin-specific edTreg. Vimentin-specific Teff cells were produced from LV Vim418 TCR transduction of CD4+ T cells and expanded for 15 days. For the polyclonal assay, Vim Teff were incubated with anti-CD3/CD28 beads with no Treg, untd edTreg, Vim edTreg, or mock cells. For the antigen-specific suppression assay, Vim Teff cells were co-cultured with APCs and Vim418 peptide in the presence of no Treg, untd edTreg, Vim edTreg, or mock cells. FIG. 120C depicts a graph of percentage suppression of Vim Teff proliferation by no Treg, untd edTreg, Vim edTreg, or mock in the presence of a-CD3/CD28 (black) or APC and Vimentin peptide (grey) calculated from percentage proliferation in FIG. 120B. The vimentin -specific edTregs showed antigen-specific and polyclonal suppressive function of antigen-specific T effector cells by in vitro suppression assays

### Antigen-Specific and Bystander Suppression of Aggrecan-Specific Teff

[0634] Antigen-specific suppression and bystander suppression of aggrecan-specific Teff was demonstrated with aggrecan-specific edTreg and vimentin-specific edTreg, respectively.

[0635] FIG. 121A depicts flow plots show mTCRb expression in untransduced, Agg520, and Vim418 edTreg gated on LNGFR+ Foxp3+ in edited cells transduced with no LV, LV Agg520-TCR, and LV Vim418-TCR, respectively. The Agg520 TCR has specificity to the epitope Aggrecan 520-539. FIG. 121B depicts a polyclonal suppression assay using Agg520 Teff and edTreg or mock specific to Agg520 or Vim418. Aggrecan-specific Teff cells were produced from LV Agg520-TCR transduction of CD4+ T cells and expanded for 15 days. Agg520 Teff were incubated with anti-CD3/CD28 beads with no Treg, edTreg, or mock. FIG. 121C depicts a graph of percentage suppression of Agg520 Teff proliferation by no Treg, untd edTreg, Agg edTreg/mock, or Vim edTreg/mock calculated from percentage proliferation in FIG. 121B. FIG. 121D depicts an antigen-specific and a bystander suppression assay using Agg520 Teff and edTreg or mock specific to Agg520 or Vim418. Agg520 Teff cells were co-cultured with no Treg, edTreg, or mock in the presence of APCs and Agg520 peptide or Agg520+Vim418 peptide. FIG. 121E depicts a graph of percentage suppression of Agg520 Teff proliferation by no Treg, edTreg or mock calculated from percentage proliferation in FIG. 121D. Significantly, bystander suppression of aggrecan-specific Teff by vimentin-specific edTreg was demonstrated.

### Antigen-Specific and Bystander Suppression of CILP-Specific Teff

[0636] Antigen-specific suppression and bystander suppression of CILP-specific Teff was demonstrated with CILP-specific edTreg and vimentin-specific edTreg, respectively. FIG. 122A depicts flow plots of mTCRb expression in untransduced, CILP297-1, and Vim418 edTreg gated on LNGFR+ Foxp3+ in edited cells transduced with no LV, LV CILP297-1-TCR, and LV Vim418-TCR, respectively. FIG. 122B depicts a polyclonal suppression assay using CILP297-1 Teff and edTreg or mock specific to CILP297 or Vim418. CILP-specific Teff cells were produced from LV CILP297-1-TCR transduction of CD4+ T cells and expanded for 15 days. CILP297-1 Teff were incubated with anti-CD3/CD28 beads with no Treg, edTreg, or mock. FIG. 122C depicts a graph of percentage suppression of CILP Teff proliferation by no Treg, untd edTreg, CILP edTreg or mock, or Vim edTreg or mock calculated from percentage proliferation in FIG. 122B. FIG. 122D depicts an antigen-specific and bystander suppression assay using CILP297-1 Teff and edTreg specific to CILP297 and Vim418. CILP297-1 Teff cells were co-cultured with no Treg, edTreg, or mock in the presence of APCs and CILP297 peptide or CILP297+Vim418 peptide. FIG. 122E depicts a graph of percentage suppression of CILP Teff proliferation by no Treg, edTreg or mock calculated from percentage proliferation in FIG. 122D. Significantly, bystander suppression of CILP297-1 specific Teff by Vim edTregs was demonstrated.

### SLE-Specific edTreg and their Suppressive Activity

[0637] SLE-specific edTregs were generated. CD4 T cells were transduced with a SLE3 TCR, previously identified from a lupus patient, and the Foxp3 locus was edited.

[0638] FIG. 123A depicts flow plots of mTCRb expression and LNGFR/Foxp3 expression in edited cells expressing SLE3-TCR on day 7. SLE3-TCR was previously identified from lupus patient. edTreg cells were enriched by LNGFR expression on day 10 and LNGFR− cells were used as mock cells for suppression assays. The SLE3-TCR had a specificity the epitope SmD1 65-80. FIG. 123B depicts a polyclonal suppression assay and an antigen-specific suppressing assay using SLE-specific edTreg. SLE-specific Teff cells were produced from LV SLE3-TCR transduction of CD4+ T cells and expanded for 15 days. For the polyclonal assay, SLE3 Teff were incubated with anti-CD3/CD28 beads with no Treg, SLE3 edTreg, or mock cells. For the antigen-specific suppression assay, SLE3 Teff were co-cultured with APCs and SmD1 peptide in the presence of no Treg, SLE3 edTreg, or mock cells. Edited cells expressed SLE-TCR and have polyclonal and antigen-specific suppressive activity.

[0639] Data in this Example demonstrated the ability to generate T1D, RA and SLE antigen-specific edTdreg, with suppressive activity supporting the use of antigen-specific edTreg therapies across a broad spectrum of autoimmune diseases.

### Example 13—Dual-Editing of Human CD4+ T Cells

[0640] Human CD4+ T cells were dual edited to generate edTreg to have an endogenous TCR knock-outed/inactivated, to be antigen-specific, and/or to be drug-selectable.

### Single Locus Approach

[0641] An IL-2 split-CISC system was used in a dual HDR editing strategy to provide efficient selection and enrichment of dual edited cells with endogenous TCR knockout. A challenge of the dual-editing approach is the ability to obtain sufficient numbers of edited cells for therapeutic use. This study aimed to increase cell viability during an expansion phase. The TRAC targeting AAV HDR-donor constructs used are depicted in FIG. 124A. AAV HDR-donor constructs were designed to introduce split-CISC elements into the TRAC locus using a single locus dual editing approach. CISC components were split between 2 constructs and co-expressed with either HA-FOXP3 or the T1D4 TCR (#3240 and #3243 respectively). Repair templates were flanked by homology arms matched to gRNAs targeting the TRAC locus. Only edited CD4+ T cells that incorporated both expression cassettes were predicted to selectively expand under Rapalog exposure.

[0642] A timeline for key steps for dual AAV editing of CD4+ T cells and expansion with Rapalog is depicted in FIG. 124B. The expansion protocol was adjusted from a 10-day expansion in AP21967 (a rapamycin analog) to 7 day expansion in AP21967 followed by a 3-day recovery in IL-2 containing medium. Briefly, human CD4+ T cells were edited using human TRAC gRNA_4, and #3240 (MND.HA.FOXP3.FKBP.IL2RG) and #3243 (MND.TID4.FRB.IL2RB) AAV constructs (single-locus dual editing). Immediately following electroporation, the cells were placed in 2.5% FBS containing media (recovery media) for ˜24 hours and then maintained in 20% FBS containing media throughout the rest of the experiment. FACS analysis was done on day 3 to determine editing rate and edited populations were cultured in the presence of either IL-2 or Rapalog for an additional 7 days to enrich dual FOXP3/T1D4 positive cells. Cells were allowed to recover for 3 days in media containing IL-2 prior to FACS analysis on day 14.

[0643] Dual editing of human CD4+ T cells using FOXP3 and T1D4 split-CISC constructs within the human TRAC locus resulted in FOXP3/T1D4 double positive cells and disrupted TCR expression. FIG. 125A depicts flow plots which show T1D4 and FOXP3 expression in mock edited, single edited and dual-edited cells (using 10% volume of both #3243 and #3240 AAV) at Day 3 post editing. Viral titers were 4.2E¹¹ and 1.3E¹² for #3243 and #3240, respectively. FIG. 125B depicts flow plots which show T1D4 and CD4 expression in mock edited, and mixed edited cells. FIG. 125C depicts histograms which show percent double negative, FOXP3-HA positive, T1D4 positive and FOXP3/T1D4 double positive cells within the dual edited cells. FIG. 125D depicts histograms which show percent CD3 knockout in FOXP3/T1D4 dual edited cells vs. mock edited cells. FACS analysis demonstrated an initial editing rate of 1.6% in T1D4/FOXP3 dual-edited cells compared to 0% in mock edited cells and CD3 knock-out (KO) of 70% in dual-edited cells.

[0644] A robust enrichment of dual edited FOXP3/T1D4 expressing cells and increased CTLA4 expression was observed with AP21967 treatment of dual edited cells. TRAC locus dual-editing was performed as shown in FIG. 124A and FIG. 124B. FIG. 126A depict flow plots showing viability and T1D4 and FOXP3 expression in dual-edited cells treated with either 50 ng/mL IL-2 (upper panels) or 100 nM Rapalog (AP21967; lower panels) for 7 days. FIG. 126B depict flow plots showing CTLA4 expression of T1D4/FOXP3 double positive vs. double negative cell populations treated with either 50 ng/mL IL-2 (upper panels) or 100 nM Rapalog (AP21967; lower panels) for 7 days. FACS analysis following enrichment at day 7 showed a steady increase in FOXP3/T1D4 dual positive cells over time with 19.1% double positive cells at day 7 in AP21967 compared to 1.47% in IL-2.

[0645] Cell viability in AP21967 declined in comparison to cells treated with 50 ng/mL IL-2 (11% viability vs. 95% viability respectively) (FIG. 126A). To improve cell viability following AP21967 treatment, cells were cultured in 50 ng/mL IL-2 containing medium following 7 days in AP21967. An improved viability and continued enrichment of dual edited FOXP3/T1D4 expressing cells was observed for cells treated with AP21967 following recovery in IL-2. TRAC locus dual-editing was performed as shown in FIG. 124A and FIG. 124B. Cells were analyzed at Day 10 following a 3-day recovery in IL-2 containing medium. FIG. 127A depicts flow plots showing viability (right plots) and T1D4 and FOXP3 expression (left plots) in dual-edited cells following treatment with 50 ng/mL IL-2 (upper plots) vs. 100 nM AP21967 (lower plots) after recovery in IL-2 medium. FIG. 127B depicts a graph showing fold enrichment of double positive T1D4/FOXP3 cells treated with either 50 ng/mL IL-2 or 100 nM Rapalog (AP21967) over a 10 day period with the last 3 days being in recovery media containing IL-2. Following recovery in IL-2, overall viability increased from 11% to 20.7% (FIG. 126A, FIG. 127A) and the percentage of double positive FOXP3/T1D4 cells continued to increase to 24.9%. Overall, the double-positive antigen-specific Treg population enriched approximately 15-fold over the course of this study (FIG. 127B), suggesting this may be an approach to improve viability and expansion.

[0646] To further characterize the T1D4/FOXP3 expressing cells, expression of CTLA4, a marker of FOXP3 expressing natural T regulatory cells (nTreg) was measured. FIG. 126B shows that double positive T1D4/FOXP3 expressing cells exhibited an increased expression of CTLA4 compared to the double-negative population consistent with a Treg-like phenotype.

[0647] This study further demonstrated that dual-editing can be used to introduce both a candidate TCR and the IL2 split-CISC cassette, and for enrichment using a Rapalog and generation of antigen-specific edTreg.

### Dual Editing Using Decoy-CISC (Split-DISC) Constructs

[0648] Rapamycin can be used in clinical studies using CISC-expressing edTreg. “Decoy-CISC” (DISC) constructs for efficient enrichment using either Rapamycin or AP21967 were tested. Split-DISC constructs were used to determine the enrichment and expansion of dual-edited T cells. The ability to scale up manufacturing to obtain cell numbers sufficient for animal studies by expanding edited CD4+ T cells in gREX flasks was assessed. In particular, dual-editing and enrichment of human CD4+ T Cells using split-DISC constructs was studied. Briefly, FIG. 128A depicts a split IL-2 DISC HDR knock-in construct (#3280), for selection of dual-edited cells in either Rapamycin or Rapalog. To generate the split decoy-CISC (split-DISC), the free FRB domain for cytoplasmic Rapamycin sequestration was added to the MND.mCherry.FKBP.IL2RG construct to generate (MND.mCherry.FKBP.IL2RG.FRB (#328)). Each repair template (#3280 and #3207) was flanked by identical homology arms matched to a gRNA targeting the TRAC locus. Edited CD4+ T cells incorporating one copy of each construct were predicted to selectively expand under Rapalog or Rapamycin treatment. FIG. 128B depicts a timeline of steps for dual AAV editing of CD4+ T cell using AAV #3280 and #3207, expansion with Rapalog/Rapamycin and analysis of enriched cells. Cells were bead stimulated (CD3/CD28) for 3 days prior to editing. Immediately following electroporation, the cells were placed in 2.5% FBS containing media (recovery media) for ˜24 hours and then maintained in 20% FBS containing media throughout the rest of the experiment. Three days post editing, cells were analyzed by flow for GFP and mCherry expression, and then expanded in media containing 50 ng/ml human IL-2 or 100 nM Rapalog.

[0649] Dual editing of human CD4+ T cells using decoy-CISC (split-DISC) constructs and enrichment with AP21967 resulted in robust expansion of double positive cells. FIG. 129A depicts flow plots showing mCherry and GFP expression in dual edited cells (10% culture volume of #3280 and #3207 AAV donors, respectively) four days post editing. Viral titers were 3.30E+12 and 3.1E+10 for #3280 and #3207 respectively. FIG. 129B depicts flow plots showing viability (upper panel) and GFP and mCherry expression (lower panel) following the seeding of 7.6 million edited cells in gREX and 7 day expansion in the presence of AP21967 leading to 32-fold expansion of double-positive cells. The FACS analysis confirmed an initial editing rate of 4.47% mCherry/GFP double positive cells and enrichment to 66% mCherry/GFP double positive cells after 7 day expansion in gREX in the presence of AP21967. The results demonstrated a 32-fold expansion of double positive cells during the 7-day treatment in AP21967 resulting in a total of 11.1 million double positive cells from the original 340,000 cells seeded into gREX.

[0650] As second study was performed with a substantially similar protocol as immediately above. Dual editing of human CD4+ T cells using decoy-CISC (split-DISC) constructs and enrichment with AP21967 resulted in robust expansion of double positive cells. FIG. 130A depicts flow plots showing mCherry and GFP expression in dual edited cells (10% culture volume of #3280 and #3207 AAV donors, respectively) four days post editing. Viral titers were 3.30E+12 and 3.1E+10 for #3280 and #3207 respectively. FIG. 130B depicts flow plots show viability (upper panel) and GFP and mCherry expression (lower panel) following the seeding of 7.6 million edited cells in gREX and 7 day expansion in the presence of AP21967 leading to 32-fold expansion of double-positive cells.

[0651] Robust expansion of dual edited human CD4+ T cells using decoy-CISC (split-DISC) constructs was reproducible. FIG. 130A depicts a timeline of key steps for dual AAV editing of CD4+ T cell using AAV #3280 and #3207, expansion with Rapalog and analysis of enriched cells. Cells were bead stimulated (CD3/CD28) for 3 days prior to editing. Three days post editing, cells were analyzed by flow for GFP and mCherry expression, and then expanded in media containing 100 nM Rapalog for an additional 7 days. FIG. 130B depicts a flow plot showing mCherry and GFP expression in dual edited cells (10% #3280 and 10% #3207 AAV). Viral titers were 3.30E+12 and 3.1E+10 for #3280 MND.mCherry.FKBP.IL2RG.FRB and #3207 pAAV.MND.GFP.FRB.IL2RB respectively.

[0652] Expansion of dual edited human CD4+ T cells using decoy-CISC (split-DISC) constructs with AP21967 resulted in 45-fold increase in enriched cells. Cells were dual-edited as depicted in FIG. 130A. FIG. 131 depicts flow plots show viability and GFP and mCherry expression following the seeding of edited cells in gREX and 7 day expansion in the presence of AP21967. The total number of double positive cells in gREX at day 7 was 9.7 million, a ˜45-fold increase from the initial seeding of 216,000 double positive cells.

[0653] Importantly, these studies demonstrated that dual-editing strategy into the TRAC locus using the split DISC constructs provided at least a ˜45-fold expansion of dual edited cells. This level of expansion was similar to that observed using an all-in-one DISC constructs in a single editing event. Thus, this approach provides an efficient enrichment of dual-edited cells for in-vivo transplantation studies and ultimately clinical application.

### Ag-Specific Treg Mouse Studies

[0654] To assess functional activity of mouse Ag-specific edTreg cells, an antigen-specific in vitro suppression assay was established. The proliferation of BCD2.5 (islet-antigen specific) Teff was assessed. The BCD2.5 (islet-antigen specific) Teff were activated by a BDC peptide in the presence and absence of BCD2.5-expressing MND.LNGFR.P2A edTregs or purified BCD2.5 TCR expressing nTreg. Briefly, FIG. 132A depicts an in vitro suppression assay using mouse edTreg or nTreg. MND.LNGFR.p2A (#3261) edited Treg were enriched by anti-LNGFR column at day 2 post editing and resuspended into RPMI media containing 10% FBS. nTreg (CD4+CD25+), Teff (CD4+CD25+) and antigen presenting cells (CD4+CD25+) were isolated from the spleen and lymph nodes cells of 8 to 10 weeks old NOD BDC2.5+ mice by column enrichment. Enriched 5×10⁶ Teff were resuspended in 2 ml of PBS and labeled with cell trace violet for 15 minutes at 37° C. and then washed and resuspended in media before their addition in suppression assay. To setup this assay, 2.0×10⁵ irradiated APCs (2500 rad) were loaded with 0.25 μg/ml BDC peptide together with 0.5×10⁵ Teff and titrated numbers of BDC2.5+ nTreg or edTreg in a U bottom 96 well tissue culture plate with total volume of 250 μl media. Cells were incubated at 37° C. in CO₂ incubator of four days. At day 4 cells were washed twice with PBS and stained with live/dead, anti-CD4, anti-CD45 and CD25, and analyzed by FACS (LSRII) for the suppression of Teff proliferation by Treg. FIG. 132B depicts representative flow data obtained showing a reduction of BDC2.5+ Teff proliferation in the presence of BDC2.5+ edTreg cells. This demonstrated suppression of peptide-activated Teff cells in the presence of edTregs.

[0655] An in vitro suppressive function of murine BDC2.5+ nTreg and edTreg was observed. FIG. 133 depicts flow cytometry plots showing cell trace violet labeled CD4+ T cells in the presence and absence of mock, MND.LNGFR.p2A (#3261) edited Treg or nTregs from NOD BDC2.5+ mice. Numbers in each flow plots indicated the proportion of proliferating vs non-proliferating cells, respectively. Murine edTreg and nTregs exhibited robust in vitro suppressive function. These data demonstrated that edTreg cells expressing the LNGFR selectable marker (MND.LNGFR.P2A #3261) exhibited antigen-specific suppressive activity in vitro.

[0656] In vivo activities of edTreg were examined with methods substantially similar to those in Examples 6 and 11. In particular, antigen specific T cell function was examined in an NSG adoptive transfer model in which nTregs and column enriched edTregs were compared. Engineered BDC2.5+ antigen-specific (BDC) edTregs, or antigen-specific nTregs were infused into the mice followed by infusion of antigen-specific Teff cells. Mice were monitored for diabetes up to 49 days. FIG. 134 depicts a graph showing the percent of diabetic mice after receiving effector cells plus the designated mock edited, MND.LNGFR.P2A edited or nTreg cells from NOD BDC2.5 mice. Column enriched Ag-specific MND.LNGFR.P2A edTregs completely prevented diabetes in NSG mice and exhibited comparable function to nTregs.

[0657] In another study, engineered BDC2.5+ antigen-specific (BDC) edTregs, or antigen-specific nTregs were infused into the mice followed by infusion of antigen-specific Teff cells. Mice were monitored for diabetes up to 33 days. FIG. 135 depicts a graph showing the percent of diabetic mice after receiving effector cells plus the designated mock edited, MND.LNGFR.P2A edited or nTreg cells from NOD BDC2.5 mice. Column enriched Ag-specific MND.LNGFR.P2A edTregs completely prevented diabetes in NSG mice and exhibited comparable function to nTregs. Strikingly, column-enriched LNGFR+ BDC2.5 edTregs completely prevented diabetes in NSG mice and exhibited comparable function to BDC2.5 nTreg in two separate experiments (FIG. 134 and FIG. 135).

### Example 14—Activity of a Truncated FRB-IL2RB Component in a Split CISC System

[0658] As disclosed herein, a split CISC system was used to edit two different genomic loci in cells, including antigen-specific engTreg cells. A split CISC system comprising a full-length FRB-IL2RB component was compared with a system comprising a truncated FRB-IL2RB component in which the IL2RB was truncated (See e.g., WO 2019/210057, which is expressly incorporated by reference in its entirety).

[0659] A dual editing strategy was employed using a FOXP3 knock-in construct (3324) encoding an FKBP-IL2RG component of the split-CISC system (FIG. 146, row A); and either a TRAC targeting HDR construct (3243) encoding a full-length FRB-IL2RB (FIG. 146, row B), or a TRAC targeting HDR construct (3333) encoding a truncated FRB-IL2RB (FIG. 146, row C). The FOXP3 knock-in construct also encoded an intracellular FRB polypeptide to bind intracellular rapalog. The TRAC targeting HDR constructs were designed to express a T1D4 islet TCR in combination with the FRB-IL2RB component of the split-CISC system.

[0660] CD4+ T cells were transduced with either a combination of the 3324/3243 constructs or the 3324/3333 constructs. Three days after dual knock-in editing of CD4+ T cells, the inventors used FACS analysis to monitor protein expression and cell viability. Specifically, a FACS analysis was performed on the transduced cells for viability versus cell size (FSC-A), T1D4 expression versus CD3 expression, and T1D4 expression versus HA-tagged FOXP3 (FIG. 147).

[0661] Cells transduced with either a combination of the 3324/3243 constructs or the 3324/3333 constructs showed no significant decrease in viability compared to control “mock” cells (FIG. 147). However, there was a significant reduction of CD3 in cells containing a construct, as expected following TRAC targeting. Furthermore, cells expressing either construct had a significantly higher population of TID4/FOXP3-HA double positive cells compared with control. This demonstrated that both the FOXP3 construct (3324) and either the construct encoding a full-length FRB-IL2RB (3243) or the construct encoding a truncated FRB-IL2RB (3333) were expressed efficiently in CD4+ T cells.

[0662] Transduced CD4+ T cells were contacted for 7 days with 100 nM AP21967 (Rapalog, a rapamycin derivative). At the end of 7 days, the cells underwent FACS analysis for viability versus cell size (FSC-A), T1D4 expression versus CD3 expression, and T1D4 expression versus HA-tagged FOXP3 (FIG. 148). While there was no significant change in viability between cells expressing either the construct encoding a full-length FRB-IL2RB (3243) or the construct encoding a truncated FRB-IL2RB (3333), cells transduced with the truncated FRB-IL2RB (3333) construct had significantly lower signal for T1D4 and FOXP3-HA compared to cells transduced with the full length FRB-IL2RB (3243) construct. Parallel quantification of double positive fold enrichment indicated that cells with the 3243 construct had approximately 4-times higher enrichment than cells with the 3333 construct. This surprising observation provided evidence that expression levels of FKB-IL2RG were likely rate limiting for CISC functional activity.

### Example 15—Effect of Orientation of an FRB-IL2RB Component in a Construct of a Split CISC System

[0663] The effect of the orientation of an FRB-IL2RB component in a construct of a split CISC system was tested. A construct comprising a TRAC targeting construct (3323) in which sequences encoding a truncated FRB-IL2RB were proximal to an MND promoter was prepared (FIG. 149, row A), and compared to a TRAC targeting construct (3333) in which sequences encoding the truncated FRB-IL2RB were distal to an MND promoter with intervening sequences encoding a T1D1 TCR polypeptide (FIG. 149, row B).

[0664] CD4+ T cells were transduced with a combination of a FOX3P targeting construct (3324) and either the 3323 construct or the 3333 construct. The enrichment capacity for the alternative TRAC targeting constructs was compared in a 7-day time course using 5 ng/mL IL-2, 100 nM AP21967 (Rapalog), or 10 nM Rapamycin (FIG. 150A). Unexpectedly, cells transduced with 3324/3323 had significantly greater enrichment for T1D4 and FOXP3-HA compared to cells transduced with 3324/3333 (FIG. 150A). This finding demonstrated that repositioning the sequences encoding the truncated FRB-IL2RB to be proximal to the MND promoter markedly improved the split-CISC system functionality.

[0665] An additional example related to a comparison of split CISC enrichment is depicted in FIG. 150B, FIG. 150C, and FIG. 150D. Constructs comprising sequences encoding a truncated FRB-IL2RB proximal to an MND promoter, (3323 and 3354), and a construct in which sequences encoding the truncated FRB-IL2RB were distal to an MND promoter with intervening sequences encoding a T1D4 TCR polypeptide (3234) were prepared (FIG. 150B). CD4+ T cells were transduced with a combination of a FOX3P targeting construct (3324) and either the 3323, 3354 or 3243 construct. The enrichment capacity for the alternative TRAC targeting constructs was compared in an 8-day time course using 100 nM AP21967 (Rapalog), or 10 nM Rapamycin. FIG. 150C depicts a FACS analysis of transduced cells. FIG. 150D depicts graphs of absolute vs fold enrichment between the different dual editing groups.

### Example 16—Effect of Promoter Linked to an FRB-IL2RB Component in a Construct of a Split CISC System

[0666] The finding that split CISC function was dependent upon location of elements within the HDR donor cassette suggested that CISC function may be dependent upon protein expression levels. To test this idea, lentiviral vectors were generated containing alternative promoters designed to express the CISC cassette at alternative levels. The constructs contained either the MND promoter linked to sequences encoding the FRB-IL2RB (1272), or the EF1-alpha promoter linked to sequences encoding the FRB-IL2RB (3312), each construct also included sequences encoding an mCherry reporter gene (FIG. 151, panel A). CD4+ T cells were transduced with either construct.

[0667] As demonstrated by flow cytometry analysis of mCherry expression per cell, the EF1a promoter resulted in significantly lower overall expression in CD4+ T cells (FIG. 151, panel B). Following 7 days exposure to 100 nM AP21967, cells with the EF1a promoter showed significantly weaker expression as analyzed by FACS (FIG. 152, panel A). Subsequent graphing of the fold enrichment for mCherry expression indicated that the EF1a promoter induced 4-fold lower expression than the MND promoter (FIG. 152, panel B). Consequently, lower expression levels reduced CISC function. Overall, this data provided evidence that a threshold level of expression of split CISC components may have a role in the overall activity of the split CISC system.

### Example 17—In Vitro Suppression Assay with edTreg Cells

[0668] The activity of islet-specific edTregs to suppress islet-specific T cells was determined. Briefly, polyclonal islet-specific Teff cells, islet-specific edTreg cells, and monocyte-derived dendritic cells (mDC) were generated from peripheral blood mononuclear cells (PBMC) from T1D or control donors for use in a suppression assay (FIG. 154, panel A).

[0669] The polyclonal islet-specific Teff cells were generated by isolation of T cells (CD4+CD25−) from PBMCs, incubation with irradiated autologous antigen-presenting cells (APC) (CD4−CD25+) and a pool of islet-specific peptides (GAD65₁₁₃₋₁₃₂, GAD65₂₆₅₋₂₈₄, GAD65₂₇₃₋₂₉₂, GAD65₃₀₅₋₃₂₄, GAD65₅₅₃₋₅₇₂, IGRP₁₇₋₃₆, IGRP₂₄₁₋₂₆₀, IGRP₃₀₅₋₃₂₄, and PPI₇₆₋₉₀) at 5 μg/ml for a total of 12-14 days (FIG. 153, panel A). After 7 days of incubation, cells were expanded in media with IL-2 at 20 ng/mL added in 2-3-day intervals. Cells were harvested between day 12-14 and islet-specific T cells were detected by tetramer staining (FIG. 153, panels B and C). The tetramer+ population was assessed and combined over five different experiments using 3 individual T1D donors after 12-14 of in vitro peptide stimulation. Staining with no tetramer was included as a negative staining result. A population of T cells enriched for a mixture of islet-specific T cells was obtained. A fraction of the polyclonal islet-specific Teff cells were harvested at day 7 (d7 islet Teff), and the remaining fraction of cells were expanded with IL-2 and harvested at day 14 (d14 islet Teff). Both d7 islet Teff and d14 islet Teff were used as Teff in the suppression assay (FIG. 154, panel A). The Teff were labeled with cell trace violet (CTV).

[0670] Monocyte-derived DC were generated by isolation of CD14+ cells from PBMC using CD14 microbeads (Miltenyi), then cultured in media supplemented with GM-CSF and IL-4 at 800 U/ml and 1000 U/ml, respectively, for 7 days to differentiate into mDC. These were later used as the APC in an antigen-specific suppression assay (FIG. 154, panel A).

[0671] The edTreg were generated from by CD4+CD25− T cells isolated from PMBC. The edTreg were labeled with EF670. The islet-specific edTregs included an IGRP-specific T1D2-TCR, or an GAD65-specific 4.13-TCR, which were specific for the IGRP₃₀₅₋₃₂₄ and GAD65₅₅₃₋₅₇₃, polypeptides, respectively. As indicated above, the IGRP₃₀₅₋₃₂₄ and GAD65₅₅₃₋₅₇₃, polypeptides were each present in the peptide pool used to generate the polyclonal islet-specific Teff cells.

[0672] In the suppression assay, the d7 islet Teff or d14 islet Teff were cultured with either no Treg, edTreg with endogenous polyclonal TCR, T1D2 mock, T1D2 edTreg, 4.13 mock, or 4.13 edTreg in the presence of mDC and a pool of 9 islet-specific peptides. Co-culture in the presence of mDC and DMSO was included as a negative control and showed no significant proliferation of Teff (data not shown). Results of this dye-dilution based assay demonstrated islet-peptide specific proliferation (FIG. 154C). Under antigen-stimulation conditions, polyclonal islet Teff proliferated specifically in the presence of mDC and the nine islet peptides after 4 days of incubation. Notably, islet peptide-specific proliferation was suppressed by both T1D2 edTregs and 4.13 edTregs. The edTregs with endogenous polyclonal TCR or mock islet-specific T cells regardless of their TCR did not show significant suppression of polyclonal islet enriched Teff. These results indicated that edTreg expressing islet TCR suppressed autoreactive islet-specific T cells with a variety of specificities in vivo from individuals with T1D.

### Example 18—Effects of TCR Avidity on edTreg Suppression Activity

[0673] Effects of TCR avidity on suppressive activity of edTreg were determined. edTreg were generated with different TCRs which targeted the same antigenic peptide with different avidities. The TCRs were specific for an IGRP₃₀₅₋₃₂₄ peptide and included: T1D2, T1D5-1, and T1D5-2 (FIG. 155, panels A and B). edTreg were labeled with CTV and co-cultured with APC and serial dilutions of the IGRP₃₀₅₋₃₂₄ polypeptide. Four days after the co-culture, cells were stained and analyzed for proliferation. Co-culture in the presence of mDC and DMSO was included as a negative control and showed no significant proliferation of Teff. edTregs cells containing the T1D5-2 TCR demonstrated superior suppression of Teff proliferation compared to edTreg containing either T1D5-1 TCR or T1D2 TCR. This suggested that the edTreg with a higher avidity TCR had a greater suppression activity (FIG. 155, panels C and D). However, in a suppression assay, which included polyclonal islet-specific Teff, mDC and a pool of islet peptides, an edTreg containing a T1D2 TCR, exerted superior suppression activity compared to an edTreg containing a T1D5-1 TCR which had a higher avidity than the T1D2 TCR (FIG. 155, panels E and F).

[0674] In a parallel experiment to demonstrate the superior suppressive capacity of edTreg with higher TCR activity, CTV-labeled T1D5-2 Teff or T1D4 Teff were co-cultured with or without EF670-labeled T1D5-1 edTreg or T1D5-2 edTreg in the presence of APC and IGRP 305, IGRP 241, or IGRP 241+305 peptides. Three days after the co-culture, cells were treated with BFA for four hours, stained, and analyzed (FIG. 162, panel A). T1D5-2 had a higher TCR activity than TID5-1; consistently, TID5-2 had significantly higher suppression of polyclonal islet Teff proliferation (FIG. 162, panel B). This also corresponded with cytokine production; the higher TCR activity of TID5-2 correlated inversely with the production of TNF and IL-2 (FIG. 162, panel C). Collectively, this data showed that TCR activity in edTreg significantly influenced suppression of both polyclonal islet Teff proliferation and cytokine production.

[0675] As disclosed herein, islet-specific edTreg suppressed polyclonal islet-specific T cells derived from PBMC. CD4+ T cells transduced with lentiviral T1D2, T1D4, T1D5-1, T1D5-2, 4.13, GAD₁₁₃, or PPI₇₆ TCR were labeled with CTV and co-cultured with APC and their cognate peptide with serial dilutions. Four days after the co-culture, cells were stained and analyzed for proliferation (FIG. 156A, panel A). Similar to the above case, T1D2, T1D4, T1D5-1, T1D5-2, 4.13, GAD₁₁₃, and PPI₇₆ TCR were all specific for IGRP₃₀₅₋₃₂₄ peptide, but showed different avidity (FIG. 156A, panel B). Additional results are shown in FIG. 156B. Polyclonal islet Teff were cultured with no Treg, T1D2 edTreg, or 4.13 edTreg in the presence of mDC and a pool of 9 islet-specific peptides (FIG. 156A, panel C). There was superior suppression of Teff proliferation by 4.13 edTreg than T1D2 edTreg, although not as superior as T1D5-1 edTreg shown in FIG. 155, panel C. This suggested that the edTreg with the highest avidity TCR was most effective. When polyclonal islet Teff were cultured with no Treg, T1D2 edTreg, GAD113 edTreg or PPI edTreg in the presence of mDC and a pool of 9 islet-specific peptides, the lower avidity TCR exerted superior suppression on Teff proliferation in comparison to the others. Consistent with the previous results, T1D2 edTreg, the edTreg with the lowest avidity TCR, showed the highest suppression of polyclonal islet Teff proliferation.

[0676] The superior suppressive function of edTreg on polyclonal islet Teff was further demonstrated through examining additional TCRs. CD4+CD25− T cells were isolated from PBMC and co-cultured with 9 islet-specific peptides (5 GAD65-specific peptides, 3 IGRP peptides, 1 PPI-specific peptide) and irradiated CD4−CD25+ cells for 7 days for generation of islet-specific CD4+ T cells. Islet-specific T cells and edTreg or mock cells were labeled with CTV and EF670, respectively. Islet-specific T cells were incubated with no Treg, untd edTreg, T1D2 edTreg, or T1D2 mock cells in the presence of CD3/CD28 activator beads. Four days after the co-culture, cells were stained and analyzed (FIG. 163, panel A). The islet-specific edTreg significantly suppressed the polyclonal islet T cells. Similarly, the same islet-specific T cells were co-cultured for 4 days with no Treg, untd edTreg, T1D2 edTreg, or T1D2 mock cells in the presence of monocyte-derived DC and a pool of 9 islet-specific peptides or DMSO (FIG. 163, panel B). Following the same trend as observed above, in the presence of mDC and a pool of 9 islet-specific peptides, the lower avidity TCR exerted superior suppression.

### Example 19—Modified TCR Activity and Islet-Specific edTreg Enhance Suppressive Activity

[0677] Certain edTreg cells expressing islet-TCRs were generated. edTreg cells with islet-TCRs (no LV TCR, T1D4, or T1D5-1 TCR) were enriched by LNGFR expression using MACS LNGFR beads. LNGFR+ cells were aliquoted and frozen down for further experiments. A timeline of the methodology for generating Treg cells and assessing antigen-specific suppression is depicted in FIG. 157, panels A and B. Briefly, CD4+ T cells were transduced with islet-TCRs (T1D4 or T1D5-1 TCR), which were then used as Teff cells. Teff cells and Treg cells were labeled with different reagents—for example CTV or EF670- and co-cultured with or without edTreg cells at a 1:1 ratio in the presence of APC (autologous irradiated PBMC) and various peptides. Cells were stained and analyzed by flow after 3-4 days following incubation for measuring cytokine generation and proliferation of Teff cells. Teff cell proliferation in response to CD3/CD28 bead activation and antigen-specific proliferation were analyzed (FIG. 158). CD4+ T cells transduced with T1D5-1-TCR (T1D5-1 Teff) were labeled with CTV and co-cultured with or without EF670-labeled untransduced edTreg (untd edTreg), edTreg expressing T1D5-1 TCR (T1D5-1 edTreg), or T1D5-1 mock cells in the presence of CD3/CD28 activator beads. Same T1D5-1 Teff with or without untd edTreg, T1D5-1 edTreg, or T1D5-1 mock cells were co-cultured with APC and IGRP 305 peptide. Three days after the co-culture, cells were stained and analyzed for Teff proliferation as dilution of CTV. Both edTreg and T1D5-1 edTreg cells demonstrated significant suppressive activity of Teff proliferation compared with mock cells.

[0678] Antigen-specific and bystander suppression on Teff by edTreg was assessed (FIG. 159). Teff and Treg cells were labeled with CTV and EF670, respectively. T1D5-1 Teff were co-cultured with or without T1D4 edTreg or T1D5-1 edTreg in the presence of APC and various peptides (IGRP 241, IGRP 305, or IGRP₂₄₁+IGRP 305). Four days after the co-culture, cells were stained and analyzed for Teff proliferation as dilution of CTV. T1D4 TCR was specific for pIGRP 241, while T1D5-1 TCR was specific for pIGRP 305. T1D4 TCR did not show significant suppression when in contact with IGRP 305 but induced significant suppression on Teff with IGRP 241 and IGRP₂₄₁+IGRP₃₀₅. Conversely, T1D5-1 TCR demonstrated significant suppression on Teff in all three peptide exposures. This analysis demonstrated significant bystander suppression by T1D4 edTreg.

[0679] Cytokine production in both Teff and bystander Teff by edTreg was examined (FIG. 160 and FIG. 161). Teff and Treg cells were labeled with CTV and EF670, respectively. T1D4 or T1D5-2 Teff cells were co-cultured with or without T1D4 edTreg or mock cells in the presence of APC and IGRP 241 peptide, or IGRP 305 and IGRP 241/305 peptides. Three days after the co-culture, cells were treated with BFA for 4 hours, stained, and analyzed for cytokine generation from Teff cells. Similar to the above results, TID4 Teff and TID4 edTreg cells in the presence of IGRP 241 significantly suppressed cytokine production compared to mock cells. Conversely, T1D5-2 Teff cells with TID4 edTreg cells had much lower cytokine production in the presence of both IGRP 241+305 peptides compared with IGRP 305 alone. Collectively, this data indicated that Teff by edTreg causes significant suppression of cytokine production.

### Example 20—Generation of Engineered EngTregs from Umbilical Cord Blood-Derived CD4+ T Cells

[0680] Umbilical cord blood (UCB)-derived EngTregs were produced by isolating CD4+ cells from umbilical cord blood, and introducing an expression cassette comprising FOXP3 cDNA under the control of an MND promoter into the FOXP3 locus at the first coding exon (FIGS. 166A-166B). Cells expressing CD4 were isolated, then CD3 and CD28 on the cells were stimulated using CD3/CD28 Dynabeads. Following removal of beads, cells were edited by the introduction of a ribonucleoprotein complex containing a Cas9 protein and sgRNA, and infection with an AAV vector containing a donor template for integration of an MND-FOXP3 cDNA expression cassette into the FOXP3 locus (FIG. 167). After editing was confirmed by flow cytometry, edited cells were enriched and expanded by stimulation with IL-2 to induce proliferation. UCB-derived EngTregs exhibited similar editing and expansion efficiencies to EngTregs derived from circulating CD4+ cells from peripheral blood (PB) (FIG. 167). Expansion and cell survival was improved by culture in tissue culture plates, compared to a G-rex device (FIG. 167).

[0681] The immunophenotype of UCB-derived EngTregs was evaluated by flow cytometry analysis, following staining of cells for surface markers and intracellular staining for the production of pro-inflammatory cytokines. Compared to mock-edited cells, UCB-derived EngTregs expressed more FOXP3 and CD25, indicating conversation to a FOXP3+CD25+ Treg phenotype (FIG. 168). UCB-derived EngTregs also produced markedly lower levels of IL-2, IL-4, TNF-α, and IFN-γ following PMA/ionomycin stimulation than mock-edited cells did, indicating a downregulation of pro-inflammatory activity.

[0682] The capacity of UCB-derived EngTregs to protect against autoimmune pathology in vivo was evaluated in a mouse model of graft-vs-host disease (GvHD). NSG mice were irradiated, then engrafted with autologous mock-edited PB CD4+ cells, autologous PB-derived EngTregs, or allogeneic UCB-derived EngTregs. 3 days later, all mice were injected with allogeneic effector (Teff) cells, which cause pathology similar to that of GvHD in this mouse model. Mice were monitored for signs of disease, weight loss, and survival over 56 days. UCB-derived EngTregs protected mice from death and weight loss with similar effectiveness to PB-derived EngTregs (FIG. 169). Thus, UCB-derived EngTregs are effective at alleviating the symptoms of autoimmune and inflammatory conditions in vivo.

[0683] UCB-derived EngTregs were also produced by an alternative gene editing approach, in which an expression cassette driven by an MND promoter and encoding an FKBP-IL2Rg polypeptide, FRB-IL2Rb polypeptide, and FRB polypeptide was inserted into the FOXP3 locus at the first coding exon. Each polypeptide is separated by a P2A self-cleavage motif, and is in-frame with the open reading frame encoding FOXP3, such that the MND promoter drives transcription and subsequent translation of one polypeptide containing 1) FKBP-IL2Rg polypeptide, 2) FRB-IL2Rb polypeptide, 3) FRB polypeptide, and 4) FOXP3 (FIG. 170B). Following translation, each of the four components is cleaved by the P2A self-cleavage domain, such that the edited cell expressed FOXP3, both components of a CISC that simulate IL-2 signal transduction in the presence of rapamycin or a rapalog, and an intracellular FRB protein to prevent excess rapamycin or rapalog from stimulating intracellular mTOR (FIG. 170A). Flow cytometry confirmed that UCB-derived EngTregs expressed both FOXP3 and CISC components, based on the presence of the P2A self-cleavage motifs (FIG. 170E). EngTregs expressing this CISC and intracellular FRB protein exhibited upregulation in FOXP3 expression, and lower levels of pro-inflammatory cytokine production upon PMA/ionomycin stimulation, relative to mock-edited UCB-derived CD4+ cells (FIGS. 170C-170D). CISC-expressing UCB-derived EngTregs could be enriched by exposure to rapamycin, indicating successful expression of both CISC components that dimerize in the presence of rapamycin (FIGS. 170F-170G).

### Example 21—Generation of Engineered Tregs (EngTregs) from Umbilical Cord Blood Derived CD4+ T Cells Via HDR-Mediated FOXP3 Gene Editing

[0684] An additional in vivo study was performed to compare allogeneic UCB EngTregs vs autologous PB Mock edited cells or autologous PB EngTregs in xenogeneic GvHD mouse model. This study was performed using UCB EngTregs from two different donors. The in vivo study showed that the EngTregs derived from allogeneic UCB significantly delayed GvHD onset in NSG mice, increasing the overall survival rate of mice and protecting animals from weight loss associated with GvHD. This data clearly showed that UCB allogeneic EngTregs exerted robust suppressive activity similar to autologous EngTreg derived from peripheral blood sources. This data provided further evidence that efficacy was reproducible and not donor dependent.

### In Vitro and In Vivo Characterization of UCB-Derived EngTreg Product—Repeat Experiment

[0685] In this study, a procedure outlined herein was used to edit, enrich, and expand UCB CD4 T cells for generating two UCB EngTreg products from different UCB donors. The timeline and procedure for editing and expansion is outlined in FIG. 171. Briefly, FIG. 171 includes: CD4 isolation: CD4+ T from UCB MNCs using Easysep CD4 negative isolation #19052; CD4 activation: 0.5 million cells/ml with 3:1 bead-to-cell ratio using Dynabeads™ Human T-Expander CD3/CD28 (Thermo Fisher (11141D); Culture media: RPMI1640 with 20% FBS, HEPES, GLUTAMAX, β-Mercaptoethanol, IL-2 (50 ng/ml); Nuclease and guide: Aldervon Spyfi Cas9 (Research grade)+Biospring T9 guide (50 uM stock) @1:2.5 (20 pmol: 50 pmol); RNP delivery: Lonza, EO-115; AAV: AAV6 #3066 (MND-FOXP3cDNA-LNGFR); Enrichment: CD271 Microbead (Miltenyi #130-099-023), LS column (Miltenyi #130-042-401); with minor modifications of manufacture's protocol; Expansion: expand mock and enriched EngTregs with 3:1 T-expander beads in plates; Expansion media: RPMI1640 with 20% FBS, HEPES, GLUTAMAX, β-Mercaptoethanol, IL-2 (50 ng/mL), rapamycin (100 nM, one-time treatment at plating); split/expand on 3rd and 5th day of expansion; no additional beads or rapamycin added during the 7-day expansion; Cryopreservation: freeze expanded mock and enriched EngTregs in Cryostor CS10 after bead removal.

[0686] For this study, UCB and PB cells were edited with AAV6 #3066 (MND-FOXP3cDNA-LNGFR). It was found that: 1) pre-editing fold expansion, 2) editing efficiency, 3) purity and 4) post enrichment expansion was nearly identical with both UCB donors and similar to previous data. Likewise, the UCB-derived EngTregs from both donors displayed Treg immunophenotype (high levels of FOXP3 and LNGFR, as well as CD25, CTLA-4 and ICOS, and concomitant reduction in inflammatory cytokine production (IL-2, IL-4, TNF-alpha, or INF-gamma) as assessed by the response to PMA/ionomycin stimulation (FIG. 172A, FIG. 172B), consistent with a Treg-like phenotype and EngTregs derived from PB.

[0687] In vivo functional activity of the UCB and PB EngTreg products derived from production protocols provided herein from two individual donors was evaluated. Autologous PB Mock edited cells, autologous PB EngTregs and allogeneic UCB EngTregs were compared in xenogeneic GvHD mouse model. The study design is shown in FIG. 173A and the results are shown in FIG. 173B and FIG. 173C. The in vivo study showed that the EngTregs derived from PB and UCB delay GvHD onset in NSG mice, increased the overall survival rate of mice and protected animals from weight loss associated with GvHD, consistent with the data described herein. The survival curve of NSG mice in combined xenoGvHD studies is shown in FIG. 174, and represents the combined results of 2 CB EngTreg products against 3 different allogenic PB-derived CD4 Teffs populations. P values were calculated using Log-rank (Mantel-Cox) test which demonstrated a significant difference between autologous mock edited PB compared to autologous LNGFR PB and allogeneic LNGFR UCB, but no significance between the LNGFR PB compared to LNGFR UCB.

[0688] The results of the in vivo xenogeneic GvHD study described here using 2 independent UCB donors, was consistent with a previous study and definitively showed that UCB EngTregs exhibited significant protective effects in vivo in a highly relevant model of autoimmunity. These products increased the overall survival rate of mice and protect these animals from weight loss associated with GvHD driven by activated allogeneic CD4 effector T cells. Importantly, these studies demonstrated that UCB EngTreg performed equivalently to autologous CD4 EngTreg derived from the peripheral blood T cells of the donor driving GvHD, supporting their clinical application in allogeneic settings.

### Example 22—Generation of FOXP3-Expression Engineered Regulatory T Cells in CD4+ and CD8+ T Cell Populations Using a Gene Editing Approach in CD3+ T Cells

[0689] Having established that lentiviral delivery of MND-driven FOXP3 into CD3+ T cells can convert CD8+ T cells to CD8+ EngTregs, CD4+ and CD8+ EngTregs generated through a gene editing approach were compared. Compared with LV delivery, the HDR-based gene editing approach was predicted to lead to a more stable/robust CD8+ EngTreg population due to epigenetic silencing and/or integration dependent variegation of expression of the integrated LV cassette.

[0690] Generation of EngTregs using a gene editing approach with CISC containing and non-CISC containing constructs in CD4+ T cells has been demonstrated. In the experiments described herein, the same approach to edit CD3+ T cells was performed, and the Treg properties in both CD4+ and CD8+ T cell subsets of the edited product were compared. FIG. 175A depicts AAV construct MND.IL-2.CISC (#3195) which was used to introduce the CISC cassette into the FOXP3 locus in CD3+ T cells, and depicts the timeline for the study (FIG. 175B). The CD8+ and CD4+ population in mock edited and #3195 edited CD3+ T cells, 2 days post editing, were similar. Specifically, for mock edited cells: 52.9% CD8+; 44.1% CD4+; for #3195 edited CD3+ T cells: 58.2% CD8+; 39.2% CD4+. Editing efficiency as measured by FOXP3 expression in each T cell subset was similar: 22.3% and 19.8% for CD8+ and CD4+ respectively. FIG. 175C. Importantly, a high level of purity of CD8+ EngTregs was reached with rapamycin enrichment and expansion (90.4% FOXP3+/CD25+ cells), similar to CD4+ (91.6% FOXP3+/CD25+) (FIG. 175D). CD4+ and CD8+ EngTregs cell populations had a reduction of inflammatory cytokines compared to mock edited cells (FIG. 175F) and demonstrated a Treg phenotype with high FOXP3, CD25, and ICOS, and low CD127 (FIG. 175E). In addition, in vitro suppression studies using CD4 and CD8 EngTregs demonstrated significant suppression of CD4 and CD8 responder cells, compared to CD4 and CD8 mock cells, with CD8 EngTregs having slightly more suppressive activity than CD4 EngTregs (FIG. 175G).

### Generation of CD8 EngTregs Using a Gene Editing Approach in CD8+ Purified T Cells

[0691] The results shown in FIGS. 175A-175F, demonstrated that the CD8+ T cell population of CD3+ FOXP3 edited cells, had a phenotype and suppressive activity similar CD4+ Treg. To determine if FOXP3-expressing engineered regulatory T cells from a purified CD8+ T cell population can be generated, the construct and editing/expansion procedure as depicted in FIG. 175A and FIG. 175B was used, on purified CD8+ T cells rather than CD3+ cells. FIG. 176 depicts the editing efficiency as measured by FOXP3 expression was 35.1% in purified CD8+ T cells edited with the MND.IL-2.CISC construct compared to 23.4% in mock edited cells. The minimal FOXP3 expression in mock edited cells was caused by transient expression of FOXP3 T conv upon cell activation. Note, that after several days in culture, FOXP3 transient expression went away. In contrast, CISC EngTregs reached 82.6% FOXP3+ purity following the addition of rapamycin for 20 days compared to 4.7% FOXP3+ cells in mock edited CD8+ T cells treated with IL-2 (FIG. 177A, FIG. 177B). In addition to rapamycin alone, rapamycin plus IL-7 or IL-15 was also tested as various studies have suggested that IL-15 may be beneficial in cultures of CD8 T cells including memory populations. Results demonstrated that IL-7 and IL-15 had no additional impact on the purity of CISC EngTregs. This suggested that IL-7 and IL-15 were not needed for CD8 EngTreg generation and based upon the enrichment curves, these cytokines may have had a negative impact on the expansion of CD8 EngTregs. Further analysis of the CD8+ EngTregs (derived from purified CD8+ T cells), demonstrated a similar phenotype (FIG. 178) and cytokine production FIG. 179) as seen with CD8+ EngTregs and CD4+ EngTregs (derived from CD3+ T cell editing, shown in FIG. 175). Mock edited cells and CISC EngTregs treated with IL-7 and IL-15 showed similar immune markers and cytokine profile as cells in the standard culture conditions indicating that these cytokines were not necessary for generation of CD8 EngTregs with Treg characteristics.

### Generation of CISC Expressing CD8 EngTregs Using a Dual Editing Approach

[0692] As described herein, a CISC containing CD4+ EngTreg product using a dual editing approach generated antigen-specific EngTregs. This approach used split-CISC constructs expressing the FKBP-IL2RG component and FRB-IL2Rb, and edited into the TRAC and FOXP3 locus thereby permitting the selection of only dual edited cells using the CISC system. Dual locus editing was used to generate EngTregs that express alternative antigen or other targeting moieties including CARs and/or other receptors or tissue homing entities. In the studies outlined below, using the A2-CAR split-CISC constructs shown, the ability to dual-edit CD3+ and CD8+ T cells to generate a A2CAR CISC-expressing dual-edited CD8+ EngTregs was demonstrated.

[0693] FIGS. 180A-180D depict timelines, editing constructs and cell products produced using LV.A2CAR+single edit and dual editing strategies. Samples 1-6 include FOXP3 locus single edited cells with or without (+/−) LV A2CAR transduction in CD3+ and CD8+ cells. This approach was used to generate mock, polyclonal CISC EngTregs and LV.A2CAR CISC EngTregs. Samples 7-9 include dual-edited CD3 T cells. Sample 7 is a control. Sample 8 includes dual-edited A2CAR Split-CISC EngTregs. CD3 T cells were treated with T9 RNP targeting FOXP3 T9 and T4 RNP targeting TRAC plus AAV 3363 and AAV 3407. Sample 9 was first transduced with LV.A2CAR and then dual edited using FOXP3 T9 and TRAC T4 RNP plus AAV 3195 generating LV.A2CAR-TCRnull-CISC EngTregs. Certain constructs encoding A2 CARs are listed in the following TABLE 4. Sequences are shown in FIG. 189.

TABLE 4

| Construct | Label | SEQ ID NO: |
|---|---|---|
| VECTOR: lentiviral vector expressing | LV.3350_pRRL_{—} | SEQ ID NO: 1416 |
| A2CAR.P2A and truncated LNGFR | MND.A2scFV(H1K2).CD28TM.CD28.CD3z- | |
| | P2A.LNGFR | |
| extracted sequence from LVA2CAR (3350_pRRL_{—} | | SEQ ID NO: 1417 |
| MND.A2scFV(H1K2).CD28TM.CD28.CD3z- | | |
| P2A.LNGFR) containing the gene | | |
| expression cassette: | | |
| MND.A2scFV.CD28TM.CD28.CD3z-P2A.LNGFR | | |
| VECTOR: lentiviral vector expressing a non- | LV.delta A2CAR | SEQ ID NO: 1418 |
| signaling A2CAR protein | (3351_pRRL_MND.A2scFV(H1K2).CD28TM- | |
| | P2A.LNGFR), non-signaling | |
| extracted sequence from LV.delta A2CAR | | SEQ ID NO: 1419 |
| (3351_pRRL_MND.A2scFV(H1K2).CD28TM- | | |
| P2A.LNGFR) for the gene expressing cassette | | |
| containing MND.A2scFV(H1K2).CD28TM- | | |
| P2A.LNGFR) | | |
| VECTOR: TRAC-T4 guide specific AAV, with | AAV A2CAR for TRAC locus | SEQ ID NO: 1420 |
| 0.3 kb homology arms upstream and | (3407_AAV.TRAC03_{—} | |
| downstream of gene expression cassette | MND.FKBP.IL2Rg.P2A.A2CAR.polyA_{—} | |
| containing the MND promoter, FKBP.IL2Rg | 0.3_T4) | |
| coding sequence, P2A coding sequence, | | |
| A2CAR coding sequence and poly A signal | | |
| extracted sequence from 3407 containing 0.3 | | SEQ ID NO: 1421 |
| kb 5′ homology arm, the MND promoter, | | |
| FKBP.IL2Rg coding sequence, P2A coding | | |
| sequence, A2CAR coding sequence, poly A | | |
| signal, and 0.3 kb 3′ homology arm | | |
| VECTOR: TRAC-T4 guide specific AAV, with | AAV delta A2CAR for TRAC locus | SEQ ID NO: 1422 |
| 0.3 kb homology arms upstream and | (3408_AAV.TRAC03_{—} | |
| downstream of gene expression cassette | MND.FKBP.IL2Rg.P2A.A2CAR.polyA_{—} | |
| containing the MND promoter, FKBP.IL2Rg | 0.3_T4), non-signaling | |
| coding sequence, P2A coding sequence, non- | | |
| signaling A2CAR coding sequence and poly A | | |
| signal | | |
| extracted sequence from 3408 containing 0.3 | | SEQ ID NO: 1423 |
| kb 5′ homology arm, the MND promoter, | | |
| FKBP.IL2Rg coding sequence, P2A coding | | |
| sequence, non-signaling A2CAR coding | | |
| sequence, poly A signal, and 0.3 kb 3′ | | |
| homology arm | | |
| VECTOR: TRAC-T1 guide specific AAV, with | AAV A2CAR for TRAC locus | SEQ ID NO: 1424 |
| 0.3 kb homology arms upstream and | (3409_TRAC03_{—} | |
| downstream of gene expression cassette | MND.FKBP.IL2Rg.P2A.A2CAR.polyA | |
| containing the MND promoter, FKBP.IL2Rg | for T1) | |
| coding sequence, P2A coding sequence, | | |
| A2CAR coding sequence and poly A signal | | |
| extracted sequence from 3409 containing 0.3 | | SEQ ID NO: 1425 |
| kb 5′ homology arm, the MND promoter, | | |
| FKBP.IL2Rg coding sequence, P2A coding | | |
| sequence, A2CAR coding sequence, poly A | | |
| signal, and 0.3 kb 3′ homology arm | | |
| VECTOR: TRAC-T1 guide specific AAV, with | AAV deltaA2CAR for TRAC locus | SEQ ID NO: 1426 |
| 0.3 kb homology arms upstream and | (3410_TRAC03_{—} | |
| downstream of gene expression cassette | MND.FKBP.IL2Rg.P2A.A2CARdelta.polyA | |
| containing the MND promoter, FKBP.IL2Rg | for T1, non-signaling | |
| coding sequence, P2A coding sequence, non- | | |
| signaling A2CAR coding sequence and poly A | | |
| signal | | |
| extracted sequence from 3410 containing 0.3 | | SEQ ID NO: 1427 |
| kb 5′ homology arm, the MND promoter, | | |
| FKBP.IL2Rg coding sequence, P2A coding | | |
| sequence, non-signaling A2CAR coding | | |
| sequence, poly A signal, and 0.3 kb 3′ | | |
| homology arm | | |

[0694] All the samples were analyzed on day 3 post editing for HIDR (FIG. 181-FIG. 184) and showed moderate to high levels of single and dual editing. HIDR in CD3 cells was detected by flow on day 3 post editing and demonstrated dual expression of FOXP3 and A2CAR in LV.A2CAR CISC EngTregs in 12.600 of the cells (FIG. 181). Looking at individual subsets within CD3 T cells, it was demonstrated that the cells included 16.2% A2CAR+/FOXP3+ cells in the CD4+ subset and 6.2% A2CAR+/FOXP+ in the CD8+ subset compared to 0% for mock and polyclonal CISC EngTregs (FIG. 182).

[0695] HDR analysis in CD8 cells showed 4.42% of the cells had dual expression of FOXP3 and A2CAR in the LV.A2CAR CISC EngTregs (FIG. 183). FIG. 184B shows the flow-based HDR detection at day 3 post-editing in mock and dual-editing CD3 cells (mock vs A2CAR Split-CISC CD3 EngTregs) demonstrating high single and dual editing efficiency. HDR was 43% and 35% at the FOXP3 and TRAC locus respectively. Strikingly, 18.3% of the dual HDR-edited cells expressed both A2CAR and FOXP3+.

[0696] Notably, CD4+ and CD8+ subsets of the CD3 dual-edited cells showed a similar single and dual editing rates (42.3% and 43.4% in CD4+ gated and CD8+ gated cells respectively for at FOXP3 locus and 37.1% and 31.3% in CD4+ gated and CD8+ gated cells for TRAC locus) FIG. 185. Dual-edited cells expressing A2CAR and FOXP3 was 20% for CD4 and 15.8% for CD8 T cell subsets respectively. In addition, LVA2CAR transduced CD3+ T cells treated with FOXP3 T9 and TRAC T4 RNP followed by AAV 3195 (CISC donor template), to generate LV.A2CAR-TCRnull-CISC CD3+ EngTreg cell product has 15.1% A2CAR+/FOXP+ cells (FIG. 186A, FIG. 186B).

[0697] Editing using full CISC constructs also included selective enrichment of HDR edited CD8 EngTregs. Two to three days post editing, prior to enrichment with rapamycin, cells transduced with LV.A2CAR were LNGFR enriched with LNGFR affinity selection. The cell purity, verified by flow, ranged from 92.6% to 98.9% purity in CD3 LVA2CAR.LNGFR, CD3 LVA2CAR.LNGFR+3195 CISC editing and CD8 LVA2CAR.LNGFR+3195 CISC edited cells (FIG. 187). Cells with full CISC constructs and split CISC constructs were expanded in rapamycin and were analyzed for expansion, phenotype, cytokine and in vitro suppression.

[0698] In summary, an analysis of CD8+ EngTregs was extended (derived from CISC EngTreg CD3+ T cells) to include a demonstration of suppressive activity equal to or greater than what is observed with CD4+ EngTregs. It was also demonstrated that generate CD8+ EngTregs can be generated with a T regulatory phenotype by editing purified CD8+ T cells. Third, importantly, a dual editing approach was used successfully to generate an antigen-specific CISC-expressing dual-edited CD8+ EngTreg (A2CAR Split-CISC EngTreg) from CD3+ T cells that expresses A2CAR, FOXP3 and split CISC. These cells are currently expanding, and it is anticipated that dual-edited A2CAR-specific CD8 EngTregs will enrich in rapamycin and exhibit T reg characteristics. Future studies using these cell products will include an assessment of the antigen-specific CISC-expressing dual-edited CD8+ EngTreg in comparison to a similar CD4+ cell product to evaluate suppressive function in vitro and in a GVHD in vivo model.

[0699] To test the efficacy of CD8 A2CAR CISC EngTregs compared to CD4 A2CAR CISC EngTregs in an in vivo model, a GVHD in vivo study is performed. This study uses A2+ PBMCs as effector cells to induce GVHD in NSG mice in the presence of CD8 or CD4 EngTregs. FIG. 188 depicts an outline of a study plan. CD4 and CD8 A2CAR EngTregs both reduce GVHD in the subjects, and CD8 EngTregs perform better in this model.

### Example 23—Islet-Specific Engineered Treg Exhibit Robust Antigen-Specific and Bystander Immune Suppression in Type 1 Diabetes Models

[0700] Adoptive transfer of regulatory T cells (Treg) is therapeutic in Type 1 diabetes (T1D) mouse models. Notably, Treg specific for pancreatic islets are more potent than polyclonal Treg in preventing disease. However, the frequency of antigen-specific natural Treg is extremely low and ex vivo expansion may destabilize Treg leading to an effector phenotype. Disclosed herein are durable, antigen-specific engineered (Eng) Treg derived from primary human CD4+ T cells by combining FOXP3 homology-directed repair editing and lentiviral TCR delivery. Using TCRs from clonally expanded CD4+ T cells in T1D, islet-specific EngTregs that suppressed effector T cell (Teff) proliferation and cytokine production were generated. EngTregs suppressed Teff recognizing the same islet antigen as well as bystander Teff recognizing other islet antigens via production of soluble mediators and both direct and indirect mechanisms. Adoptively transferred murine islet-specific EngTregs homed to the pancreas and blocked diabetes triggered by islet-specific Teff in recipient mice. These data demonstrated the use of antigen-specific EngTregs as a targeted therapy to treat or prevent TID.

[0701] T1D is an organ-specific autoimmune disease where autoreactive T cells target insulin-producing beta cells in the pancreatic islets resulting in a severe loss of endogenous insulin production (1, 2). Regulatory T cells (Treg), characterized by expression of the forkhead box transcription factor FOXP3, are important for maintaining peripheral tolerance and preventing excessive immune responses and autoimmunity. In humans, loss-of-function mutations in the FOXP3 gene leads to Treg defects resulting in a severe multi-organ autoimmune and inflammatory disorder referred to as immune dysfunction, polyendocrinopathy, enteropathy, X-linked (IPEX) syndrome. Among the wide range of autoimmune disorders in IPEX is early onset of T1D, demonstrating a key role of FOXP3⁺ Treg in maintaining islet-specific tolerance (1, 3). Several studies have suggested that reduced Treg number or impaired Treg function could be central to the pathogenesis of T1D (1, 2, 4, 5). Consequently, increasing the number or functional activity of Treg has become a major candidate strategy for therapeutic intervention to treat and prevent the disease (6, 7).

[0702] The therapeutic potential of Treg has been shown in various preclinical models of organ transplantation and autoimmune diseases (8). While adoptive transfer of expanded polyclonal Treg has shown clinical activity (8), it has been demonstrated that antigen-specific Treg are more efficacious than polyclonal Treg in numerous preclinical studies including T1D, multiple sclerosis, colitis, rheumatoid arthritis, and transplantation (9-15). For example, Treg specific for pancreatic islet antigens were more effective than polyclonal Treg in preventing T1D progression in murine models of T1D, and even reversed disease (9, 16, 17). Moreover, polyclonal Treg have multiple specificities and may lead to global immunosuppression (18). In contrast, antigen-specific Treg accumulate in target tissues and local lymphoid compartments where antigen presentation takes place, reducing the risk of off-target immunosuppression and making them both more efficacious and safer than polyclonal Treg for adoptive cell therapy.

[0703] Circulating Treg constitute only 1-2% of peripheral blood lymphocytes in humans (19-22) and the frequency of islet antigen-specific Treg in the blood is much lower. Isolating such rare cells is difficult and successfully expanding them to a clinically relevant number has not been reported to date. These challenges have motivated investigators to develop antigen-specific Treg through the transduction of TCRs with known specificities into Treg (8). TCR-transduced Treg selectively localize to the targeted tissue and can exert antigen-specific and bystander suppression (11, 13, 14, 23). However, as a therapeutic application, this approach has limitations due to the overall scarcity of Treg in the blood. Additionally, a fraction of Treg found in the blood are unstable under autoimmune inflammatory conditions (24-27) leading to concerns that extensive expansion may lead to loss of FOXP3 expression and reversion to an effector phenotype (8, 28, 29).

[0704] A gene editing approach designed to enforce FOXP3 expression in primary CD4⁺ T cells is disclosed herein (30). Introduction of a strong promoter element, MND, into the endogenous FOXP3 locus by homology directed repair (HDR)-mediated gene editing, mediated stable FOXP3 expression in human CD4⁺ T cells, resulting in robust production of engineered cells with Treg phenotype and suppressive function (EngTregs). As disclosed herein, this novel therapeutic platform was significantly expanded by combining FOXP3 gene editing with human TCR gene transfer to generate antigen-specific EngTregs from primary conventional CD4⁺ T cells. As disclosed herein, the capacity of these antigen-specific cell products to suppress both direct and bystander Teff responses via a variety of mechanisms in vitro and in vivo was demonstrated

### Results

### Generation of Islet-Specific EngTregs by FOXP3 HDR-Editing and LV TCR Transduction

[0705] Human islet-specific EngTregs were generated using lentiviral vectors (LV) encoding islet-specific TCRs in conjunction with an approach to induce FOXP3 expression using HDR-based gene editing disclosed herein (30). TABLE 5 shows the six different islet-specific TCRs used in this study, derived from Teff isolated from individuals with T1D.

TABLE 5

| TCR | Islet | Epitope | Epitope | SEQ ID |
|---|---|---|---|---|
| name | antigen | location | sequence | NO: |
| T1D2 | IGRP | 305-324 | QLYHFLQIPT | SEQ ID |
| | | | HEEHLFYVLS | NO: 1430 |
| T1D4 | IGRP | 241-260 | KWCANPDWIH | SEQ ID |
| | | | IDTTPFAGLV | NO: 1431 |
| T1D5-1 | IGRP | 305-324 | QLYHFLQIPT | SEQ ID |
| | | | HEEHLFYVLS | NO: 1432 |
| T1D5-2 | IGRP | 305-324 | QLYHFLQIPT | SEQ ID |
| | | | HEEHLFYVLS | NO: 1433 |
| 4.13 | GAD65 | 553-572 | KVNFFRMVIS | SEQ ID |
| | | | NPAATHQDID | NO: 1434 |
| GAD265 | GAD65 | 265-284 | KGMAALPRLI | SEQ ID |
| | | | AFTSEHSHFS | NO: 1435 |
| PPI76 | Prepro- | 76-90 | SLQPLALEGS | SEQ ID |
| | insulin | | LQKRG | NO: 1436 |

[0706] Notably all are HLA-DR0401 restricted and targeted distinct antigens; three recognized islet-specific glucose-6-phosphatase-related protein (IGRP), two recognized glutamic acid decarboxylase (GAD65) and one recognized pre-proinsulin (PPI) (31) and unpublished data). Importantly, these TCR specificities enabled assess to suppression of Teff responses by islet-specific Treg in a number of scenarios including: Treg and Teff having TCRs restricted to the same peptide-MHC complex; Treg and Teff having TCR restricted to different peptides within the same antigen; and Treg and Teff having TCRs with different antigen specificities. For each TCR, an expression cassette for the alpha and beta chain variable regions was cloned into a lentiviral backbone, and included the murine TCR constant region to ensure specificity of pairing between the transgenic TCR chains and permit antibody detection of the exogenous TCR (FIG. 190E, FIG. 190F). Antigen specificity of LV TCR transduced T cells was confirmed using a dye-based proliferation assay with proliferation occurring only in the presence of cognate peptide FIG. 190G). LV encoding islet-specific TCRs were next used to generate islet-specific engineered Treg (islet-specific EngTregs) as outlined in FIG. 190A. In brief, primary human CD4⁺ T cells were transduced with LV encoding islet-specific TCR after 24 h activation with CD3/CD28 beads. Two days after LV transduction, HDR editing of the FOXP3 locus was performed using CRISPR/Cas9 and an AAV6 donor template as described previously (30). As part of this donor cassette, a cis-linked, truncated LNGFR coding sequence (cytoplasmic domain deleted) (32) was introduced within exon 1 and separated by a P2A sequence to enable ribosomal skipping during translation (FIG. 190B). Inclusion of LNGFR allowed tracking and enrichment of the edited cells. Of the resulting transduced and edited T cells, 25-40% co-expressed intracellular FOXP3 and surface LNGFR, 70-95% of which expressed the transduced islet-specific TCR (FIG. 190C). In addition, transduced and edited cells were CD25⁺ CD127⁻ and upregulated CTLA-4 and ICOS expression, consistent with a Treg-like phenotype (30, 33-35). In the following study, these cells are referred to as islet-specific EngTregs.

### Islet-Specific EngTregs Exhibit Antigen-Specific Suppression of Teff Proliferation and Cytokine Production

[0707] To evaluate the suppressive function of islet-specific EngTregs, their effect was assessed on the proliferation of autologous Teff expressing the same islet-specific TCR in an in vitro suppression assay. Islet-specific EngTregs were enriched using LNGFR antibody affinity beads to greater than 85% purity (FIG. 190D); autologous Teff were prepared by transducing primary human CD4⁺ T cells with LV expressing the same islet TCR (FIG. 191E). Controls were untransduced EngTregs expressing endogenous polyclonal TCRs (henceforth referred to as poly EngTregs), and LV TCR-transduced T cells that were LNGFR⁻ (non-binding fraction during LNGFR affinity bead enrichment; FIG. 190D), henceforth referred to as islet-specific LNGFR⁻ T cells. Islet-specific EngTregs were co-cultured with cell trace violet (CTV)-labeled Teff in the presence of CD3/CD28 beads with CTV dilution used as a measure of T_{eff} proliferation (FIG. 191A, FIG. 191B). Suppressive capacity was tested for the following islet-specific TCRs: T1D5-2 TCR specific for IGRP₃₀₅₋₃₂₄; PPI76 TCR specific for PPI₇₆₋₉₀; and GAD265 TCR specific for GAD65₂₆₅₋₂₈₄. It was confirmed that islet-specific EngTregs were able to suppress CD3/CD28 bead-induced Teff proliferation to similar levels as poly EngTregs (FIG. 191B, FIG. 191C). In contrast, islet-specific LNGFR⁻ T cells had no effect on CD3/CD28 bead-induced Teff proliferation, demonstrating that the suppressive capacity was derived from FOXP3 editing (FIG. 191B, FIG. 191C). It was investigated whether the islet-specific EngTregs suppressed Teff proliferation in an antigen-specific manner by culturing in the presence of cognate peptide and APC. It was found that islet-specific EngTregs significantly suppressed antigen-induced Teff proliferation whereas poly EngTregs and islet-specific LNGFR⁻ T cells did not (FIG. 191B, FIG. 191D). Notably, similar results were observed for all three islet-specific TCRs (FIG. 191B, FIG. 191C, FIG. 191D).

[0708] Since Treg have been reported to also suppress cytokine production by Teff (36-39), it was examined whether islet-specific EngTregs also suppress Teff cytokine production. For this experiment, both EngTregs and Teff expressed the T1D5-2 TCR and were cocultured in the presence of cognate IGRP₃₀₅₋₃₂₄ peptide and APC. Teff production of TNFα, IL-2 and IFNγ was determined by intracellular cytokine staining. Islet-specific EngTregs significantly suppressed antigen-induced Teff production of TNFα, TL-2 and IFNγ compared to poly EngTregs or islet-specific LNGFR⁻ T cells, both of which had no significant effect (FIG. 192A, FIG. 192B). In addition, islet-specific EngTregs also suppressed Teff expression of the early activation marker CD25 (FIG. 192A, FIG. 192C). Collectively, these results indicated that antigen-specific suppression required not only suppressive capacity derived from FOXP3 editing, but also specific TCRs that received antigen-stimulation. They also demonstrated that islet-specific EngTregs exhibited antigen-specific suppressive capacity with respect to both Teff proliferation and cytokine production.

### Islet-Specific EngTregs Manifest Antigen-Specific Bystander Suppression

[0709] Activation of Treg is antigen-specific. However, once activated, Treg have the ability to exert bystander suppression (8, 40). This characteristic is especially important in the context of treating autoimmunity, where autoreactivity targets multiple tissue antigens. To determine whether islet-specific EngTregs can exert bystander suppression, it was investigated whether islet-specific EngTregs expressing the T1D4 TCR were able to suppress Teff expressing the T1D5-2 TCR (FIG. 193A). Note that T1D4 and T1D5-2 recognized two different IGRP epitopes, IGRP₂₄₁₋₂₆₀ and IGRP₃₀₅₋₃₂₄, respectively. T1D4 islet-specific EngTregs were co-cultured with T1D5-2 Teff in the presence of APC pulsed with either the T1D5-2 cognate peptide (IGRP₃₀₅₋₃₂₄) alone, or with a mixture of IGRP₃₀₅₋₃₂₄ plus the T1D4 cognate peptide (IGRP₂₄₁₋₂₆₀). Control Treg included poly EngTregs and T1D5-2 islet-specific EngTregs. Importantly, TCR expression levels were equivalent for both T1D4 and T1D5-2 in edited cells (FIG. 193H) and all EngTregs, irrespective of TCR, exerted similar Teff suppression in response to CD3/CD28 bead stimulation (FIG. 193I, FIG. 193J). As expected, and consistent with FIG. 191A-FIG. 191D, T1D5-2 Teff proliferation was suppressed by the T1D5-2 islet-specific EngTregs in the presence of either the cognate peptide IGRP₃₀₅₋₃₂₄ alone or with both peptides (FIG. 193B, FIG. 193C). In contrast, T1D5-2 Teff proliferation was only suppressed by T1D4 islet-specific EngTregs when both IGRP₂₄₁₋₂₆₀ and IGRP₃₀₅₋₃₂₄ peptides were present (FIG. 193B, FIG. 193C), findings consistent with bystander suppression. In contrast, islet-specific LNGFR⁻ T cells showed neither direct nor bystander suppression of Teff proliferation, although they were activated by their cognate peptides (data not shown). Importantly, the capacity for bystander suppression was not limited to EngTregs with IGRP-specific TCRs. Bystander suppression was also detected for EngTregs expressing the GAD265 TCR, which suppressed proliferation of T1D5-2 Teff when both GAD₂₆₅₋₂₈₄ and IGRP₃₀₅₋₃₂₄ peptides were present (FIG. 193D, FIG. 193E). Bystander suppression was not observed using poly EngTregs, although they did show comparable suppression as GAD265 islet-specific EngTregs on T1D5-2 Teff proliferation induced by CD3/CD28 beads (FIG. 193K, FIG. 193L). In parallel studies, bystander suppression was tested in the context of Teff cytokine production, again utilizing T1D4 islet-specific EngTregs and T1D5-2 Teff. Similar evidence of bystander suppression was observed fro: IGRP₃₀₅₋₃₂₄-specific cytokine production and CD25 expression by T1D5-2 Teff were inhibited by T1D4 islet-specific EngTregs only when its cognate peptide IGRP₂₄₁₋₂₆₀ was present in addition to IGRP₃₀₅₋₃₂₄ (FIGS. 193F-193Q). In contrast, cytokine production and CD25 expression by T1D5-2 Teff was suppressed by T1D5-2 EngTregs in the presence of IGRP₃₀₅₋₃₂₄ alone or in combination with IGRP₂₄₁₋₂₆₀ (FIGS. 193F-193Q). In summary, these combined findings showed that islet-specific EngTregs had the ability to provide bystander suppression that limited both Teff proliferation and cytokine production.

### Islet Specific EngTregs Suppress Polyclonal Islet-Specific T Cells from T1D Subjects Across Multiple Specificities

[0710] An initial assessment of the ability of islet-specific EngTregs to suppress in an antigen specific manner utilized Teff that were themselves transduced with LV encoding TCRs. However, the ultimate therapeutic goal is to suppress polyclonal islet-specific T cells in individuals at risk or with T1D. Therefore, a strategy was designed to assess the activity of islet-specific EngTregs against endogenous islet-specific Teff derived from PBMC of T1D subjects. Using PBMC from T1D donors, a parallel approach was used to generate: a) monocyte-derived DC (mDC) for use as APC; b) polyclonal islet-specific Teff; and c) EngTregs (FIG. 194A). To obtain islet specific Teff, CD4⁺CD25⁻ cells were cultured with irradiated autologous APC and a pool of 9 islet-specific peptides for 12-14 days (FIG. 194A, FIGS. 194E-194G). Peptides were chosen that were derived from IGRP, GAD65, and PPI that were known to be presented on HLA-DR0401 and for which HLA Class II tetramers were available (31, 41-45). This approach enabled Teff enriched for a mixture of islet specificities to be obtained, determined by tetramer staining, from multiple individuals with T1D. A broad range of tetramer positive cell frequencies was observed across donors, and T cells specific to GAD₁₁₃₋₁₃₂ and IGRP₂₄₁₋₂₆₀ were detected at a greater frequency than other specificities (FIG. 194F, FIG. 194G).

[0711] In parallel, CD4⁺ T cells from the same T1D donors were used to generate autologous T1D2 islet-specific EngTregs and 4.13 islet-specific EngTregs, with TCRs restricted to IGRP₃₀₅₋₃₂₄ and GAD65₅₅₃₋₅₇₃, respectively. These peptides were present among the islet peptide pool used to stimulate the polyclonal Teff (FIGS. 194E-194G). In a control experiment to test antigen-independent suppressive capacity, autologous poly EngTregs, T1D2 islet-specific EngTregs, and 4.13 islet-specific EngTregs exhibited comparable suppression of CD3/CD28 triggered Teff proliferation (FIG. 194B, FIG. 194C). In the setting of antigen-stimulation, polyclonal islet Teff proliferated in the presence of mDC and a mixture of 9 islet peptides (FIG. 194B, FIG. 194D). Poly EngTregs and islet-specific LNGFR⁻ T cells regardless of their TCR did not mediate suppression of polyclonal islet enriched Teff. Strikingly, proliferation of islet peptide-specific T1D Teff was specifically suppressed by both T1D2 islet-specific EngTregs and 4.13 islet-specific EngTregs (FIG. 194B, FIG. 194D). Superior suppressive capacity was confirmed for islet-specific EngTregs under islet-specific stimulation and that expanded natural/thymic Treg (tTreg) did not exert notable Teff suppression (FIGS. 194H-194J). Together, these findings directly demonstrated that islet-specific EngTregs generated from individuals with T1D exhibit the capacity to mediate both antigen-specific and bystander suppression of autologous, autoreactive, islet-specific Teff.

### EngTregs Utilize Both Contact-Dependent and -Independent Suppressive Mechanisms

[0712] Tregs mediate suppression via multiple mechanisms including expression of anti-inflammatory soluble mediators, inhibition of APC maturation and consumption of IL-2 (8, 46). These mechanisms may also used by human, islet-specific, EngTregs. To investigate contact-dependent and -independent mechanisms, a transwell-based assay was used to assess the role for soluble factors produced by EngTress (FIG. 195A) (47, 48). Polyclonal islet-specific Teff were generated from CD4⁺CD25⁻ T cells from T1D subjects as above and in FIGS. 195G-194I. In the upper transwell chamber, T1D2 islet-specific EngTregs were plated either alone or co-cultured with polyclonal islet-specific Teff, and in the lower chamber, polyclonal islet-specific Teff were plated. Peptide loaded mDC were plated in both chambers and cell numbers were kept equivalent between chambers (FIG. 195A). T1D2 islet-specific EngTregs plated without Teff in the upper chamber significantly suppressed the proliferation of polyclonal islet-specific Teff in the lower chamber (FIG. 195B left, FIG. 195I). Thus, islet-specific EngTregs can mediate contact-independent suppression, presumably via production of transwell permeable soluble factors. However, contact-independent suppression was incomplete and was lower than that the positive control where the islet-specific EngTregs and the polyclonal islet-specific Teff were in direct contact (FIG. 195B left, FIG. 195I). Further, cell proximity also impacted the experimental outcome. EngTreg preferentially suppressed Teff that in closest proximity. T1D2 islet-specific EngTreg in the upper chamber suppressed proliferation of upper chamber Teff but had no effect on lower chamber Teff when Teff were present in both chambers (FIG. 195B left, FIG. 195I).

[0713] To determine whether islet-specific EngTregs could inhibit APC maturation, the effect of T1D2 islet-specific EngTregs on APC expression of CD80 and CD86 was assessed. In this assay, autologous monocytes restricted to HLA-DR0401 were matured into DC and then co-cultured with T1D2 islet-specific EngTregs in the presence of its cognate peptide IGRP₃₀₅₋₃₂₄ for 2 days (FIG. 195C). T1D2 islet-specific EngTregs were able to suppress mDC activation as measured by reduced mDC expression of CD86 compared to DCs alone or T1D2 islet-specific LNGFR⁻ T cells (FIG. 195D; FIG. 195J). However, in contrast to previous studies showing that Tregs can also inhibit APC expression of CD80 (49, 50), islet-specific EngTregs had no impact on CD80 expression (FIG. 195K). Similar results were observed for T1D4 islet-specific EngTregs and PPI76 islet-specific EngTregs with both demonstrating ability to suppress CD86 expression on mDC but having no effect on CD80 expression (FIG. S8, and C).

[0714] The potential contribution of IL-2 consumption on EngTreg-mediated suppression was investigated. In mice, Treg consumption of IL-2 leads to cytokine deprivation-mediated apoptosis of Teff (51). However, it remains unclear whether this mechanism is operative in human Tregs with several studies reporting that IL-2 depletion is not required for Treg suppressive capacity (46, 52). Here, whether EngTreg suppression could be reversed by excess IL-2 was investigated, and found that addition of exogenous IL-2 had no significant effect on suppression of polyclonal islet-specific Teff proliferation (FIG. 195E, FIG. 195F).

### Islet-Specific EngTregs with Lower Functional Avidity Exhibit Superior Suppressive Activity

[0715] As part of the studies, it was observed that alternative IGRP-specific TCRs utilized in the studies exhibited different functional avidities. Therefore, these unique features were used as way to begin to explore the impact of TCR affinity on islet-specific EngTregs function. T1D2, T1D5-1 and T1D5-2 were compared, each of which recognize the same cognate peptide, IGRP₃₀₅₋₃₂₄, in the context of HLA DR0401 (TABLE 5) (31). As shown in FIG. 196A, these TCRs exhibited different functional avidities in response to cognate peptide as determined in a dose response experiment measuring cell proliferation: T1D5-2 had the highest functional avidity with proliferation at peptide concentrations as low as 0.1 g/ml; followed by T1D5-1 at 1.0 g/ml; and T1D2, with the lowest functional avidity, with proliferation only at 5 g/ml). Based on this information, a side-by-side comparison of the relative suppressive capacity of EngTregs expressing each of these islet-specific TCRs was performed. Proliferation of polyclonal islet-specific Teff (FIG. 196D, FIG. 196E) was measured in the presence of islet-specific peptides and mDC and either T1D2, T1D5-1, or T1D5-2 EngTregs. The data were normalized by suppressive activity obtained from suppression assay set up in parallel using CD3/CD8 beads (FIG. 196F, FIG. 196G). This latter assay provided a baseline control for EngTreg function, as this activation method is not impacted by TCR avidity. Strikingly, T1D2 islet-specific EngTregs, which had the lowest functional avidity, consistently showed the highest percent suppression, followed by T1D5-1 and then T1D5-2 islet-specific EngTregs (FIG. 196B, FIG. 196C; FIG. 196D, FIG. 196E). Together, these data suggested that there was an inverse relationship between TCR functional avidity and antigen-specific Treg suppressive capacity.

### Generation and In Vitro Characterization of Murine Islet-Specific EngTregs

[0716] To evaluate the in vivo efficacy of islet-specific EngTregs, methods were established to generate murine islet-specific EngTregs and tested their in vitro functional activity. Similar to the method for generating human islet-specific EngTregs, we used a CRISPR-Cas9-based HDR gene-editing strategy to introduce the MND promoter into the first coding exon of Foxp3, and a truncated LNGFR coding sequence was introduced upstream of Foxp3 (FIG. 197A, FIG. 197B). NOD.Cg-Tg(TcraBDC2.5,TcrbBDC2.5)1Doi/DoiJ (NOD BDC2.5) transgenic mice were used as the source of CD4⁺ T cells as these mice express an islet-specific TCR and rapidly induce diabetes when transferred into non-diabetic NOD mice (53-56). For negative controls, mock-edited NOD BDC2.5 CD4⁺ T cells were used that were electroporated without RNP and cultured in media containing the AAV5 donor template. In contrast to mock-edited cells, NOD BDC2.5 CD4⁺ T cells treated using both RNP and AAV demonstrated sustained LNGFR expression. Column-based LNGFR affinity purification resulted in ˜75% LNGFR⁺ cells (FIG. 197C), referred to hereafter as BDC2.5 islet-specific EngTregs. Enriched BDC2.5 islet-specific EngTregs demonstrated increased expression of LNGFR, FOXP3 and CTLA-4, with similar or higher CD25 expression compared to mock-edited cells (FIG. 197D, FIG. 197E).

[0717] The ability of the BDC2.5 islet-specific EngTregs to suppress the proliferation of activated islet-specific NOD BDC2.5 CD4⁺ Teff cells (abbreviated here as islet-specific Teff) in an antigen-dependent manner in vitro was tested. As in the human studies, proliferation by CTV dilution was assessed, and compared the suppressive capacity of BDC2.5-EngTregs, BDC2.5-tTreg and mock-edited cells (FIG. 197F). Both BDC2.5-tTreg and BDC2.5 islet-specific EngTregs showed dose-dependent suppression of BDC2.5-CD4⁺ Teff proliferation in comparison to mock-edited cells (FIG. 197G, FIG. 197H). tTreg displayed slightly better in vitro suppressive function than EngTregs, possibly reflecting the impact of thymic tTreg selection and/or programming in comparison to Teff converted EngTregs.

### Islet-Specific EngTregs Traffic to the Pancreas, Prevent Diabetes, and Stably Persist In Vivo

[0718] Whether BDC2.5 islet-specific EngTregs could prevent diabetes in vivo using a BDC2.5-CD4+ Teff induced T1D model was determined. In this model, adoptive transfer of BDC2.5-CD4⁺ Teff into immunodeficient nonobese diabetic (NOD)-scid-IL2rγ^{NULL}(NSG) mice rapidly promotes diabetes development as measured by blood glucose analysis (57). One of two doses (5×10⁴ or 1×10⁵) of BDC2.5 islet-specific EngTregs, or 5×10⁴ BDC2.5-tTreg (CD4⁺CD25^{hi} cells, column enriched and activated to match EngTregs) or mock-edited control cells were mixed with 5×10⁴ BDC2.5-CD4⁺ Teff (1:1 or 1:2 Teff:Treg ratios) and injected into 8-10 week old male recipient NSG mice (FIG. 198A). After cell transfer, blood glucose levels were monitored for up to 49 days; mice were sacrificed if they developed diabetes (blood glucose ≥250 mg/dL for two consecutive days). All diabetes-free animals were euthanized on day 49 for tissue and cell analysis. Mice infused with either BDC2.5 islet-specific EngTregs or -tTreg were almost completely diabetes-free, whereas all mice receiving mock-edited control cells developed diabetes within 9-15 days post-Teff transfer (FIG. 198B). Both doses of islet specific EngTregs prevented diabetes development. Thus, BDC2.5 islet-specific EngTregs were as effective as BDC2.5-tTreg in suppressing diabetes onset in this T1D mouse model.

[0719] In order to be beneficial, therapeutic Treg must home to the target tissue(s) and persist, maintaining a stable phenotype. To determine whether the islet specific EngTregs homed and persisted in the pancreas, pancreatic lymphocytes were isolated on day 49 by enzymatic digestion and performed flow cytometry to detect donor BDC2.5-CD4⁺ T cells (TCRvβ4⁺) and assessed the expression of LNGFR and FOXP3 (FIG. 198C). TCRvβ4⁺ EngTregs and tTreg were both present in the pancreas of diabetes-free mice on day 49. LNGFR⁺ cells were detected only in animals that received EngTregs (FIG. 198C) and these islet-specific, LNGFR⁺ EngTregs (CD4⁺ TCRvβ4⁺LNGFR⁺) maintained high-levels of FOXP3 expression. Specifically, LNGFR⁺ EngTregs expressed similar levels of intracellular FOXP3 as tTreg (CD4+ TCRvβ4⁺FOXP3⁺ cells); CD4⁺TCRvβ4⁺FOXP3⁻ cells (representing residual Teff cells) within the Treg recipient cohort (FIG. 198C). Together, these data evidence that, like BDC2.5-tTreg, BDC2.5 islet-specific EngTregs home to the pancreas and maintain FOXP3⁺ expression despite the sustained presence of islet-specific Teff.

[0720] Multiple reports have shown that islet-specific tTreg but not polyclonal tTreg are effective in preventing diabetes in T1D mouse models (9, 10, 17). To ask whether this was also true for our EngTregs, polyclonal EngTregs and tTreg were generated from NOD mice using identical methods (FIG. 198D) and compared them directly with BDC2.5 islet-specific-EngTregs and -tTreg in the NOD T1D model. 1×10⁵ polyclonal-EngTregs, or -tTreg, or BDC2.5-EngTregs or -tTreg, or mock-edited control cells were mixed with 5×10⁴ BDC2.5-CD4⁺ Teff and injected into 8-10 week-old male NSG mice (FIG. 198E). Recipients were monitored for up to 49 days for diabetes development. Consistent with previous reports, polyclonal tTreg were minimally effective in preventing T1D development, with only ˜20%- of mice remaining diabetes-free. Similarly, only limited protection was observed in recipients of polyclonal EngTregs. In contrast, nearly all mice (˜95%) receiving BDC2.5 islet specific-EngTregs or −tTreg remained diabetes-free (FIG. 198E). Taken together, these findings demonstrate a robust capacity for islet-specific EngTregs to prevent T1D development in vivo and, consistent to previous work using tTreg, they show that expression of an islet specific TCR markedly improves the potency of EngTregs.

### DISCUSSION

[0721] As described herein, the ability of antigen specific T cells derived from PBMC followed by FOXP3 editing to function in an antigen specific manner was demonstrated (30). While technically feasible, this method had several limitations in the context of autoimmunity: T cells specific for self-antigens are rare in the peripheral blood and expansion to numbers and cell purities likely to be required for therapeutic application are difficult and time consuming. Hence, as disclosed herein, efforts were focused on combining efficient delivery of islet specific TCRs derived from T1D subjects ((31) and unpublished data) with HDR-gene editing. This combined approach enabled a >10-fold expansion of antigen-specific EngTregs derived from the initial CD4⁺ T cells isolated from PBMC. Importantly, a suppressive capacity of islet-specific EngTregs under antigen-specific stimulation was demonstrated which had not been seen with either polyclonal-EngTregs or tTreg. Accordingly, the study disclosed herein in a murine model of T1D also showed that islet antigen-specific EngTregs blocked diabetes triggered by islet-specific Teff, while polyclonal EngTregs failed to limit disease progression.

[0722] It has been suggested that Treg expressing TCRs that recognize tissue-specific peptides may preferentially accumulate in target tissues, where they can be activated by these autoantigens and mediate bystander suppression (58). Mouse studies disclosed herein showed that islet-specific EngTregs predominantly localized in the pancreas following adoptive transfer and effectively suppressed diabetes triggered by islet-specific Teff. Given the possibility that polyclonal Treg can interfere with immune responses to pathogens, the ability to home to target tissues is likely critical for both efficient on-target immune suppression and for limiting the risk of impairing systemic immunity (8, 14). Further, in vitro data in human cells demonstrated that islet-specific EngTregs suppress bystander Teff with many different specificities. This breadth of bystander suppression is predicted to permit islet-specific EngTregs to locally suppress pathogenic Teff with multiple specificities including limiting Teff responses where the target autoantigens are unknown. Thus, the combination of the targeted homing and bystander suppressive capacity by EngTregs with islet-TCR likely provides a more efficient and safer strategy to treat and control autoimmune diabetes (59).

[0723] Functional studies of antigen specific human Treg is largely limited to in vitro suppression assays and it remains unclear whether these assays accurately predict in vivo function. While islet-specific EngTregs were demonstrated to mediate efficient suppressive activity on Teff in a model system utilizing Teff transduced with a relevant TCR, this system has limitations based upon testing Teff with a single specificity. Given the diversity of pathogenic autoreactive T cells in T1D, whether islet-specific EngTregs would also inhibit endogenous T1D-relevant Teff with a broad range of TCR specificities was investigated. The data provide a significant advance in this arena. Using a pool of antigen enriched, islet-specific Teff derived from T1D subjects (based upon stimulation with a broad panel of islet peptides across multiple antigens), it was demonstrated that the capacity to suppress polyclonal Teff populations using islet-specific EngTregs with single islet antigen specificity. These findings support the concept that islet-specific EngTregs can mediate antigen-specific and bystander suppression of autologous, islet-specific Teff present in T1D subjects.

[0724] Multiple mechanisms have been implicated in the suppression of CD4 T cells by Treg including modulation of costimulatory receptors on APC, production of soluble factors (such as generation of adenosine by conversion of ATP via CD39/CD73, IL-10, TGF-β and IL-35) and consumption of IL-2 (8, 46, 60). Here, mechanisms whereby islet specific EngTregs function were explored taking advantage of an ability to assess suppression in an antigen specific manner using autologous T1D subject-derived, CD4 T effectors enriched for specificity to islet antigens. Using this approach, it was demonstrated that, while IL-2 consumption is not a driver of suppression in this setting, EngTregs can function to down-modulate APC activation. Further, the transwell-based analyses showed a contribution of both contact-independent and -dependent suppressive activity. The data support an important role for soluble EngTreg secreted factors in Teff suppression. Further, the loss of suppression of Teff in the lower wells, when EngTregs suppressed co-cultured Teff in the upper wells, indicates that these soluble factors are likely consumed by Teff in closest proximity. The findings related to IL-2 consumption and the role of contact and non-contact suppression are consistent with some but not all studies of tTreg in the literature (23, 48, 52). Differences in the studies disclosed herein and those of others may be due to differences between murine and human Treg and/or the use of non-specific stimulation in the absence of APC, or use effectors with a single specificity as compared to use of polyclonal antigen-specific T cells in these studies (23, 48). Additionally, EngTregs have been derived from CD4 effector T cells and edited to constitutively express FOXP3 at relatively high levels and thus may have different functional characteristics than tTreg.

[0725] A difference in suppression between TCR with the same MHC-peptide restriction but with different functional avidities was shown. Studies utilizing CAR or TRuC receptors in Tregs indicate that the character of the signal can play a significant role in Treg function. (50, 61). Studies in murine models using Tg TCR have suggested that Treg with high functional avidity are more potent (62, 63). However, a role of low affinity Treg has also been shown in a polyclonal NOD model (64). In that study, low affinity Treg were able to compete with high affinity Treg, accumulate in sites of inflammation and the combined presence of both low and high avidity Tregs gave greater protection from diabetes (64). Studies of transduced human Treg are limited. Low affinity Class I restricted TCR transduced into Treg confer potent antigen-specific suppressive activity and impede expansion of high avidity CD8 T cells (65). A study of Treg expressing GAD 555-567 specific TCRs, 4.13 and R164 (low and high affinity respectively), demonstrated the capacity of each TCR to confer regulatory function. However, when R164 and 4.13 TCR Treg were compared for the capacity to suppress R164 T cells, 4.13 showed lower suppression, suggesting an advantage for the high avidity TCR (66). In the study disclosed herein, we employed a polyclonal islet-specific Teff pool and EngTreg expressing three alternative TCRs restricted to the same MHC-peptide complex was employed. In this setting, the TCR with lowest functional avidity yielded the greatest suppression. The findings herein may differ from previous studies due to a difference in the type of Teff, the culture conditions or differences in the mechanism(s) required for suppression by EngTreg.

[0726] In summary, described herein is an efficient strategy to generate antigen-specific EngTregs from primary CD4⁺ T cells via combining of FOXP3 HDR-editing and LV TCR transfer. It was shown that EngTregs expressing islet-TCRs suppressed both proliferation and cytokine production of antigen-specific and bystander effector Teff. Further, islet-specific EngTregs suppressed autologous pathogenic polyclonal T cells expanded from PBMC of TID patients. Consistent with these findings, adoptively transferred, islet-specific EngTregs selectively accumulated in the pancreas and prevented diabetes triggered by islet-specific Teff in vivo in recipient mice. Taken together, these findings strongly support the use of antigen-specific EngTregs in treatment of T1D and in other organ specific autoimmune or inflammatory disorders.

### MATERIALS AND METHODS

### Study Design

[0727] The objective of this study was to test whether durable, antigen-specific EngTregs could be generated using a gene editing approach combining FOXP3 homology directed repair editing and lentiviral TCR delivery. The ability of human islet specific EngTregs to suppress Teff proliferation and cytokine production in the presence of the cognate vs. irrelevant antigens were assessed in vitro. The ability of murine islet-specific EngTregs to traffic to the pancreas, prevent diabetes, and stably persist in vivo were assessed in a T1D mouse model using BDC2.5-CD4+ Teff to induce disease. Investigators were not blinded to the treatment. Figure legends list the sample size, number of biological replicates, number of independent experiments and statistical method.

### Primary Human T Cells

[0728] Human PBMCs were obtained from the Benaroya Research Institute (BRI) Registry and Repository were approved by BRI's Institutional Review Board (IRB #07109-588). Healthy control subjects had no personal or family history of autoimmune disease. Both healthy control and T1D subjects were HLA DRB1*0401.

### LV Transduction and Foxp3 Editing

[0729] CD4⁺ T cells were isolated from PBMC by magnetic bead CD4⁺ T cell isolation kit (Miltenyi) and cultured in RPMI 1640 media supplemented with 20% human serum and penicillin/streptomycin. T cells were activated with CD3/CD28 activator beads at a 1:1 bead to cell ratio and recombinant human IL-2, IL-7, and IL-15 at 50, 5, and 5 ng/ml, respectively on day 0. After 24 h activation, transduction with LV vectors encoding GAD65, IGRP, or PPI specific TCRs was performed by adding concentrated LV supernatant with polybrene at 10 g/ml. Beads were removed after 24 h incubation and cells were either rested for 16-24 h for editing or expanded in media with IL-2 (20 ng/ml) until day 14 or day 15 to be used as Teff cells. For Foxp3 editing, cells were transfected by electroporation with RNP complex combined with Cas9 and guide RNA and then transduced with AAV template. 20-24 h after editing, cells were expanded in media with IL-2 (100 ng/ml) until day 10 and islet-specific LNGFR⁺ EngTregs were enriched by LNGFR magnetic beads. LNGFR⁻ T cells also collected from the LNGFR⁺ cell enrichment to be used as controls in suppression assays.

### In Vitro Expansion and Tetramer Staining of Islet-Specific T Cells Derived from PBMC

[0730] For expanding islet-specific T cells by peptide stimulation, CD4⁺ T cells (CD4⁺CD25⁻) were isolated from PBMC and incubated with irradiated autologous CD4⁻CD25⁺ cells and a pool of islet-specific peptides (GAD65₁₁₃₋₁₃₂, GAD65₂₆₅₋₂₈₄, GAD65₂₇₃₋₂₉₂, GAD65₃₀₅₋₃₂₄, GAD65₅₅₃₋₅₇₂, IGRP₁₇₋₃₆, IGRP₂₄₁₋₂₆₀, IGRP₃₀₅₋₃₂₄, and PPI₇₆₋₉₀) at 5 g/ml. After 7 days of incubation, part of the T cells were harvested as day 7 islet-specific Teff and remaining cells were expanded in media with IL-2 at 20 ng/ml. IL-2 was added in 2-3 days of interval and cells were collected at day 14 as day 14 islet-specific Teff. In order to check population of expanded islet-specific T cells, day 14 Teff were incubated with PE-tagged tetramer for 1 h and followed by surface staining. For mechanistic experiments (Transwell suppression assay, IL-2 consumption, and TCR avidity), polyclonal islet-specific T cells were expanded with a pool of 9 islet-specific peptides (GAD65₁₁₃₋₁₃₂, GAD₂₆₅₋₂₈₄, GAD65₂₇₃₋₂₉₂, GAD65₃₀₅₋₃₂₄, GAD65₅₅₃₋₅₇₂, IGRP₁₇₋₃₆, IGRP₂₄₁₋₂₆₀, PPI₇₆₋₉₀, ZNT8₂₆₆₋₂₈₅) excluding IGRP₃₀₅-324 that is specific for T1D2 EngTregs to measure bystander suppression.

### In Vitro Suppression Assay Using CD3/CD28 Beads

[0731] 2×10⁴ Teff were cultured alone or co-cultured with EngTregs or LNGFR⁻ T cells at 1:1 ratio in the presence of CD3/CD28 beads in 96 well plate. 1:28 or 1:32 of beads to Teff ratio was used for 3- or 4-day culture, respectively. Teff and EngTregs or LNGFR⁻ T cells were labeled with Cell Trace Violet (Invitrogen) and EF670 (Thermo Fisher), respectively, before the co-culture. Dilution of Cell Trace Violet (CTV) was measured as proliferation of Teff and % suppression was calculated as (a-b)/a×100 where a is the percentage Teff proliferation in the absence of Treg and b is the percentage of Teff proliferation in the presence of Treg.

### Antigen-Specific Suppression Assay

[0732] Autologous PBMC were irradiated at 5,000 rad and used as APC in the suppression assay using Teff transduced with TCR. CTV-labeled Teff were co-cultured with EF670-labeled EngTregs or islet-specific LNGFR⁻ T cells at 1:1 ratio in the presence of APC and DMSO or relevant peptide. Cells were incubated for 4 days and stained for measuring Teff proliferation. For measuring intracellular cytokines produced by Teff, cells were cultured for 3 days and incubated with Brefeldin A for another 4 h, followed by intracellular staining.

### Antigen-Specific Suppression Assay Using Polyclonal Islet-Specific Teff Derived from T1D PBMC

[0733] CD14⁺ cells, CD4⁺CD25⁻, and CD4⁻CD25+ cells were isolated from 60 million PBMC of donors with T1D. CD14⁺ cells isolated using CD14 microbeads (Miltenyi) were cultured in media supplemented with GM-CSF and TL-4 at 800 U/ml and 1,000 U/ml, respectively, for 7 days to differentiate into monocyte-derived DC (mDC). CD4⁺CD25⁻ cells were divided, some used to generate EngTregs and the rest were used for in vitro expansion of polyclonal islet-specific Teff using 9 islet-specific peptides and irradiated autologous CD4⁻ CD25⁺ cells as described above. For the suppression assay, polyclonal islet-specific Teff harvested at day 7 or day 14 were co-cultured with or without poly EngTregs, T1D2 EngTregs, 4.13 EngTregs, or LNGFR⁻ T cells in the presence of autologous mDC and DMSO or 9 islet-specific peptides for 4 days. EngTregs/LNGFR⁻ T cells and polyclonal islet-specific Teff were labeled with EF670 and CTV, respectively, before the co-culture.

### Transwell Suppression Assay

[0734] mDC were pre-incubated with a pool of 10 islet-specific peptides (GAD65₁₁₃₋₁₃₂, GAD265-284, GAD65₂₇₃₋₂₉₂, GAD65₃₀₅₋₃₂₄, GAD65₅₅₃₋₅₇₂, IGRP₁₇₋₃₆, IGRP₂₄₁₋₂₆₀, IGRP₃₀₅₋₃₂₄, PPI₇₆₋₉₀, ZNT8₂₆₆₋₂₈₅) for 1 hour, washed, and plated in both upper and lower chambers of 96 well transwell plate with pore size 0.4 M (Corning). Polyclonal islet-specific Teff generated by stimulation with 9 islet-peptides (GAD65₁₁₃₋₁₃₂, GAD₂₆₅₋₂₈₄, GAD65₂₇₃₋₂₉₂, GAD65₃₀₅₋₃₂₄, GAD65₅₅₃₋₅₇₂, IGRP₁₇₋₃₆, IGRP₂₄₁₋₂₆₀, PPI₇₆₋₉₀, ZNT8₂₆₆₋₂₈₅) and T1D2 EngTregs were plated, where indicated. Cell populations being assessed for regulatory capacity were cultured in the upper chamber. Polyclonal islet Teff and T1D2 EngTregs were labeled with CTV and EF670, respectively, before the co-culture. After 4 days in culture, cells from both chambers were harvested and stained for FACS analysis. CTV dilution was measured to assess Teff proliferation.

### Suppression of APC Maturation Assay

[0735] CD14+ monocytes were isolated from PBMC and were cultured in the presence of GM-CSF and IL-4 for 7 days to differentiate into mDC. In the last 16-18 hours of culture, IFN-γ and CL075 were added for maturation. Matured mDC were co-cultured for 2 days with autologous CTV-labeled T1D2 EngTregs (or LNGFR⁻ T cells) at 1:2 ratio of mDC to EngTregs/LNGFR−T cells in the presence of IGRP³⁰⁵⁻³²⁴ peptide. Cells were harvested and analyzed for surface marker expression (CD86 or CD80) on DC. MFI of CD86/CD80 on mDCs were normalized by MFI of mDC only condition.

### Mice

[0736] NOD and NOD BDC2.5 mice were purchased from The Jackson Laboratory then bred and maintained at the Seattle Children's Research Institute (SCRI) SPF facility to produce the mice used in experiments here. Experimental NSG mice were purchased from The Jackson Laboratory, and acclimated at SCRI for 1-2 weeks before experiments. Experiments, breeding, and handling of mice were conducted in accordance with the National Institutes of Health's Guide for the Care and Use of Laboratory Animals using protocols approved by the Institutional Animal Care and Use Committee at the SCRI.

### Primary Mouse T Cell Isolation, Culture, Editing and Enrichment

[0737] To obtain CD4⁺ T cells for gene editing, mouse lymphocytes from spleen and lymph nodes of 8-12 weeks old NOD BDC2.5 and NOD mice were isolated and combined. CD4⁺ T cells were purified from lymphocytes by negative selection using EasySep mouse CD4⁺ T Cell Enrichment Kit (STEMCELL Technologies), then activated using mouse specific anti −CD3/CD28 coated beads (Gibco) for ˜40 hrs in a RPMI media containing 20% FBS (Omega Scientific Inc., Catalog #FB-11), HEPES, Glutamax, β-mercaptoethanol and 50 ng/mL mouse IL-2 (Peprotech). After activation, cells were separated from beads and further cultured for ˜10 hours in media then washed twice in PBS and resuspend in Buffer R (Neon kit, Invitrogen) at 25×10⁶ cells/mL. RNP was prepared in Buffer R by mixing 20 pmol of Cas9 (IDT) with 50 pmol of mouse Foxp3 specific gRNA for 25 min at room temperature. Delivery of RNP into mouse cells was achieved by electroporation (1550V, 10 ms and 3 pulses) using Neon system (Thermo Fisher Scientific) followed by incubation with AAV5 containing donor template with homology sequence to mouse Foxp3 for ˜20-24 hours at 37° C. Cells were replenished (two-fold dilution) with fresh media containing IL-2 and transferred to a new tissue culture dish for another ˜16 hours before final analysis and enrichment. Two days post editing, edited cells were collected, counted and stained for biotinylated anti-LNGFR antibody (Miltenyi Biotech) and enriched using anti-biotin microbeads (Miltenyi Biotech) as described (67).

### Isolation and Enrichment of Antigen Specific Teff and tTreg

[0738] Murine effector CD4⁺ T cells used experimentally were CD4⁺ CD25⁻, and were enriched via negative selection of CD4 and CD25 (Miltenyi Biotec) from combined single cell suspensions obtained from spleen and lymph nodes of NOD BDC2.5 mice. Murine CD4⁺ Teff were freshly prepared for each experiment. CD4⁺ CD25⁺ tTreg from antigen-specific NOD BDC2.5 and polyclonal NOD mice were enriched using a murine Treg enrichment kit (Miltenyi Biotec) according to the manufacturer's instructions. Enriched (≥90%) tTreg were activated to match EngTregs activation status and timeline, in the same media used to culture EngTregs. Activated tTreg were immunophenotyped then cryopreserved in LN₂. Prior to injection, tTreg were thawed and rested in IL-2 containing media overnight. Viability and CD4⁺ CD25⁺ FOXP3⁺ phenotype was confirmed by flow cytometry prior to injection.

### Diabetes Induction and Monitoring

[0739] 8-10 week-old male NSG mice were pre-screened for normal blood glucose values before enrolling in diabetes prevention studies. Mice were injected with 5×10⁴ islet specific Teff cells in combination with 5×10⁴ (1:1) mock-edited control, tTreg or EngTregs; in some conditions 1×10⁵ (1:2 Teff:Treg) Treg were injected. Cells were delivered via the retro-orbital sinus. Diabetes was monitored by peripheral blood sampling using a Bayer Contour Blood Glucose Monitor System (Bayer). Mice with blood glucose >250 mg/dL twice within 24 hrs or exceeding 400 mg/dL were considered diabetic and were euthanized

### Statistical Analysis

[0740] GraphPad Prism version 8 was used to conduct all statistical analyses. Specifics of the statistical tests used are indicated in each figure legend; no outliers were excluded.

[0741] All references cited herein, including those listed below are expressly incorporated by reference herein in their entireties.

### REFERENCES AND NOTES

[0742] 1. M. Willberg, A. Cooke, Immune mechanisms in type 1 diabetes. Trends in Immunology 34, 583-591 (2013).
[0743] 2. A. Pugliese, Autoreactive T cells in type 1 diabetes. J Clin Invest 127, 2881-2891 (2017).
[0744] 3. C. M. Hull, M. Peakman, T. I. M. Tree, Regulatory T cell dysfunction in type 1 diabetes: what's broken and how can we fix it? Diabetologia 60, 1839-1850 (2017).
[0745] 4. A. Ferraro, C. Socci, A. Stabilini, A. Valle, P. Monti, L. Piemonti, R. Nano, S. Olek, P. Maffi, M. Scavini, A. Secchi, C. Staudacher, E. Bonifacio, M. Battaglia, Expansion of Th17 cells and functional defects in T regulatory cells are key features of the pancreatic lymph nodes in patients with type 1 diabetes. Diabetes 60, 2903-2913 (2011).
[0746] 5. S. Lindley, C. M. Dayan, A. Bishop, B. O. Roep, M. Peakman, T. I. Tree, Defective suppressor function in CD4(+)CD25(+) T-cells from patients with type 1 diabetes. Diabetes 54, 92-99 (2005).
[0747] 6. J. A. Bluestone, J. H. Buckner, M. Fitch, S. E. Gitelman, S. Gupta, M. K. Hellerstein, K. C. Herold, A. Lares, M. R. Lee, K. Li, W. Liu, S. A. Long, L. M. Masiello, V. Nguyen, A. L. Putnam, M. Rieck, P. H. Sayre, Q. Tang, Type 1 diabetes immunotherapy using polyclonal regulatory T cells. Sci Transl Med 7, 315ra189 (2015).
[0748] 7. J. H. Esensten, Y. D. Muller, J. A. Bluestone, Q. Tang, Regulatory T-cell therapy for autoimmune and autoinflammatory diseases: The next frontier. The Journal of allergy and clinical immunology 142, 1710-1718 (2018).
[0749] 8. C. Raffin, L. T. Vo, J. A. Bluestone, T(reg) cell-based therapies: challenges and perspectives. Nat Rev Immunol 20, 158-172 (2020).
[0750] 9. Q. Tang, K. J. Henriksen, M. Bi, E. B. Finger, G. Szot, J. Ye, E. L. Masteller, H. McDevitt, M. Bonyhadi, J. A. Bluestone, In vitro-expanded antigen-specific regulatory T cells suppress autoimmune diabetes. The Journal of experimental medicine 199, 1455-1465 (2004).
[0751] 10. K. V. Tarbell, S. Yamazaki, K. Olson, P. Toy, R. M. Steinman, CD25+ CD4+ T cells, expanded with dendritic cells presenting a single autoantigenic peptide, suppress autoimmune diabetes. The Journal of experimental medicine 199, 1467-1477 (2004).
[0752] 11. L. A. Stephens, K. H. Malpass, S. M. Anderton, Curing CNS autoimmune disease with myelin-reactive Foxp3+ Treg. Eur J Immunol 39, 1108-1117 (2009).
[0753] 12. P. Zhou, R. Borojevic, C. Streutker, D. Snider, H. Liang, K. Croitoru, Expression of dual TCR on DO11.10 T cells allows for ovalbumin-induced oral tolerance to prevent T cell-mediated colitis directed against unrelated enteric bacterial antigens. J Immunol 172, 1515-1523 (2004).
[0754] 13. K. Fujio, A. Okamoto, Y. Araki, H. Shoda, H. Tahara, N. H. Tsuno, K. Takahashi, T. Kitamura, K. Yamamoto, Gene therapy of arthritis with TCR isolated from the inflamed paw. J Immunol 177, 8140-8147 (2006).
[0755] 14. G. P. Wright, C. A. Notley, S. A. Xue, G. M. Bendle, A. Holler, T. N. Schumacher, M. R. Ehrenstein, H. J. Stauss, Adoptive therapy with redirected primary regulatory T cells results in antigen-specific suppression of arthritis. Proc Natl Acad Sci USA 106, 19078-19083 (2009).
[0756] 15. J. Y. Tsang, Y. Tanriver, S. Jiang, S. A. Xue, K. Ratnasothy, D. Chen, H. J. Stauss, R. P. Bucy, G. Lombardi, R. Lechler, Conferring indirect all of specificity on CD4+CD25+ Tregs by TCR gene transfer favors transplantation tolerance in mice. J Clin Invest 118, 3619-3628 (2008).
[0757] 16. E. L. Masteller, M. R. Warner, Q. Tang, K. V. Tarbell, H. McDevitt, J. A. Bluestone, Expansion of functional endogenous antigen-specific CD4+CD25+ regulatory T cells from nonobese diabetic mice. J Immunol 175, 3053-3059 (2005).
[0758] 17. K. V. Tarbell, L. Petit, X. Zuo, P. Toy, X. Luo, A. Mqadmi, H. Yang, M. Suthanthiran, S. Mojsov, R. M. Steinman, Dendritic cell-expanded, islet-specific CD4+ CD25+ CD62L+ regulatory T cells restore normoglycemia in diabetic NOD mice. The Journal of experimental medicine 204, 191-201 (2007).
[0759] 18. C. G. Brunstein, J. S. Miller, Q. Cao, D. H. McKenna, K. L. Hippen, J. Curtsinger, T. Defor, B. L. Levine, C. H. June, P. Rubinstein, P. B. McGlave, B. R. Blazar, J. E. Wagner, Infusion of ex vivo expanded T regulatory cells in adults transplanted with umbilical cord blood: safety profile and detection kinetics. Blood 117, 1061-1070 (2011).
[0760] 19. S. Sakaguchi, T. Yamaguchi, T. Nomura, M. Ono, Regulatory T cells and immune tolerance. Cell 133, 775-787 (2008).
[0761] 20. K. L. Hippen, S. C. Merkel, D. K. Schirm, C. M. Sieben, D. Sumstad, D. M. Kadidlo, D. H. McKenna, J. S. Bromberg, B. L. Levine, J. L. Riley, C. H. June, P. Scheinberg, D. C. Douek, J. S. Miller, J. E. Wagner, B. R. Blazar, Massive ex vivo expansion of human natural regulatory T cells (T(regs)) with minimal loss of in vivo functional activity. Sci Transl Med 3, 83ra41 (2011).
[0762] 21. C. Baecher-Allan, J. A. Brown, G. J. Freeman, D. A. Hafler, CD4+CD25 high regulatory cells in human peripheral blood. J Immunol 167, 1245-1253 (2001).
[0763] 22. J. A. Bluestone, Q. Tang, T(reg) cells-the next frontier of cell therapy. Science 362, 154-155 (2018).
[0764] 23. Y. C. Kim, A. H. Zhang, J. Yoon, W. E. Culp, J. R. Lees, K. W. Wucherpfennig, D. W. Scott, Engineered MBP-specific human Tregs ameliorate MOG-induced EAE through IL-2-triggered inhibition of effector T cells. J Autoimmun 92, 77-86 (2018).
[0765] 24. Z. Zhang, W. Zhang, J. Guo, Q. Gu, X. Zhu, X. Zhou, Activation and Functional Specialization of Regulatory T Cells Lead to the Generation of Foxp3 Instability. J Immunol 198, 2612-2625 (2017).
[0766] 25. D. V. Sawant, D. A. Vignali, Once a Treg, always a Treg? Immunol Rev 259, 173-191 (2014).
[0767] 26. N. Komatsu, M. E. Mariotti-Ferrandiz, Y. Wang, B. Malissen, H. Waldmann, S. Hori, Heterogeneity of natural Foxp3+ T cells: a committed regulatory T-cell lineage and an uncommitted minor population retaining plasticity. Proc Natl Acad Sci USA 106, 1903-1908 (2009).
[0768] 27. X. Zhou, S. L. Bailey-Bucktrout, L. T. Jeker, C. Penaranda, M. Martinez-Llordella, M. Ashby, M. Nakayama, W. Rosenthal, J. A. Bluestone, Instability of the transcription factor Foxp3 leads to the generation of pathogenic memory T cells in vivo. Nat Immunol 10, 1000-1007 (2009).
[0769] 28. S. L. Bailey-Bucktrout, M. Martinez-Llordella, X. Zhou, B. Anthony, W. Rosenthal, H. Luche, H. J. Fehling, J. A. Bluestone, Self-antigen-driven activation induces instability of regulatory T cells during an inflammatory autoimmune response. Immunity 39, 949-962 (2013).
[0770] 29. N. Komatsu, K. Okamoto, S. Sawa, T. Nakashima, M. Oh-Hora, T. Kodama, S. Tanaka, J. A. Bluestone, H. Takayanagi, Pathogenic conversion of Foxp3(+) T cells into TH17 cells in autoimmune arthritis. Nat. Med. 20, 62-68 (2014).
[0771] 30. Y. Honaker, N. Hubbard, Y. Xiang, L. Fisher, D. Hagin, K. Sommer, Y. Song, S. J. Yang, C. Lopez, T. Tappen, E. M. Dam, I. Khan, M. Hale, J. H. Buckner, A. M. Scharenberg, T. R. Torgerson, D. J. Rawlings, Gene editing to induce FOXP3 expression in human CD4(+) T cells leads to a stable regulatory phenotype and function. Sci Transl Med 12, (2020).
[0772] 31. K. Cerosaletti, F. Barahmand-Pour-Whitman, J. Yang, H. A. DeBerg, M. J. Dufort, S. A. Murray, E. Israelsson, C. Speake, V. H. Gersuk, J. A. Eddy, H. Reijonen, C. J. Greenbaum, W. W. Kwok, E. Wambre, M. Prlic, R. Gottardo, G. T. Nepom, P. S. Linsley, Single-Cell RNA Sequencing Reveals Expanded Clones of Islet Antigen-Reactive CD4(+) T Cells in Peripheral Blood of Subjects with Type 1 Diabetes. J Immunol 199, 323-335 (2017).
[0773] 32. B. Fehse, A. Uhde, N. Fehse, H. G. Eckert, J. Clausen, R. Ruger, S. Koch, W. Ostertag, A. R. Zander, M. Stockschlader, Selective immunoaffinity-based enrichment of CD34+ cells transduced with retroviral vectors containing an intracytoplasmatically truncated version of the human low-affinity nerve growth factor receptor (deltaLNGFR) gene. Hum Gene Ther 8, 1815-1824 (1997).
[0774] 33. B. D. Singer, L. S. King, F. R. D'Alessio, Regulatory T cells as immunotherapy. Frontiers in immunology 5, 46 (2014).
[0775] 34. A. E. Herman, G. J. Freeman, D. Mathis, C. Benoist, CD4+CD25+ T regulatory cells dependent on ICOS promote regulation of effector cells in the prediabetic lesion. The Journal of experimental medicine 199, 1479-1489 (2004).
[0776] 35. K. Wing, Y. Onishi, P. Prieto-Martin, T. Yamaguchi, M. Miyara, Z. Fehervari, T. Nomura, S. Sakaguchi, CTLA-4 control over Foxp3+ regulatory T cell function. Science 322, 271-275 (2008).
[0777] 36. D. K. Sojka, A. Hughson, T. L. Sukiennicki, D. J. Fowell, Early kinetic window of target T cell susceptibility to CD25+ regulatory T cell activity. J Immunol 175, 7274-7280 (2005).
[0778] 37. N. Oberle, N. Eberhardt, C. S. Falk, P. H. Krammer, E. Suri-Payer, Rapid suppression of cytokine transcription in human CD4+CD25 T cells by CD4+Foxp3+ regulatory T cells: independence of IL-2 consumption, TGF-beta, and various inhibitors of TCR signaling. J Immunol 179, 3578-3587 (2007).
[0779] 38. A. Schmidt, N. Oberle, E. M. Weiss, D. Vobis, S. Frischbutter, R. Baumgrass, C. S. Falk, M. Haag, B. Brugger, H. Lin, G. W. Mayr, P. Reichardt, M. Gunzer, E. Suri-Payer, P. H. Krammer, Human regulatory T cells rapidly suppress T cell receptor-induced Ca(2+), NF-κB, and NFAT signaling in conventional T cells. Science signaling 4, ra90 (2011).
[0780] 39. A. Schmidt, N. Oberle, P. H. Krammer, Molecular mechanisms of treg-mediated T cell suppression. Frontiers in immunology 3, 51 (2012).
[0781] 40. E. M. Shevach, Foxp3(+) T Regulatory Cells: Still Many Unanswered Questions-A Perspective After 20 Years of Study. Frontiers in immunology 9, 1048 (2018).
[0782] 41. N. A. Danke, J. Yang, C. Greenbaum, W. W. Kwok, Comparative study of GAD65-specific CD4+ T cells in healthy and type 1 diabetic subjects. J. Autoimmun. 25, 303-311 (2005).
[0783] 42. J. Yang, N. A. Danke, D. Berger, S. Reichstetter, H. Reijonen, C. Greenbaum, C. Pihoker, E. A. James, W. W. Kwok, Islet-specific glucose-6-phosphatase catalytic subunit-related protein-reactive CD4+ T cells in human subjects. J. Immunol. 176, 2781-2789 (2006).
[0784] 43. J. Yang, N. Danke, M. Roti, L. Huston, C. Greenbaum, C. Pihoker, E. James, W. W. Kwok, CD4+ T cells from type 1 diabetic and healthy subjects exhibit different thresholds of activation to a naturally processed proinsulin epitope. J. Autoimmun. 31, 30-41 (2008).
[0785] 44. S. A. Long, M. R. Walker, M. Rieck, E. James, W. W. Kwok, S. Sanda, C. Pihoker, C. Greenbaum, G. T. Nepom, J. H. Buckner, Functional islet-specific Treg can be generated from CD4+CD25− T cells of healthy and type 1 diabetic subjects. Eur. J. Immunol. 39, 612-620 (2009).
[0786] 45. J. Yang, E. A. James, S. Sanda, C. Greenbaum, W. W. Kwok, CD4+ T cells recognize diverse epitopes within GAD65: implications for repertoire development and diabetes monitoring. Immunology 138, 269-279 (2013).
[0787] 46. D. A. Vignali, L. W. Collison, C. J. Workman, How regulatory T cells work. Nat. Rev. Immunol. 8, 523-532 (2008).
[0788] 47. A. M. Thornton, E. M. Shevach, CD4+CD25+ immunoregulatory T cells suppress polyclonal T cell activation in vitro by inhibiting interleukin 2 production. The Journal of experimental medicine 188, 287-296 (1998).
[0789] 48. L. W. Collison, M. R. Pillai, V. Chaturvedi, D. A. Vignali, Regulatory T cell suppression is potentiated by target T cells in a cell contact, IL-35- and IL-10-dependent manner. J. Immunol. 182, 6121-6128 (2009).
[0790] 49. Y. Onishi, Z. Fehervari, T. Yamaguchi, S. Sakaguchi, Foxp3+ natural regulatory T cells preferentially form aggregates on dendritic cells in vitro and actively inhibit their maturation. Proc Natl Acad Sci USA 105, 10113-10118 (2008).
[0791] 50. N. A. J. Dawson, I. Rosado-Sinchez, G. E. Novakovsky, V. C. W. Fung, Q. Huang, E. McIver, G. Sun, J. Gillies, M. Speck, P. C. Orban, M. Mojibian, M. K. Levings, Functional effects of chimeric antigen receptor co-receptor signaling domains in human regulatory T cells. Sci Transl Med 12, (2020).
[0792] 51. P. Pandiyan, L. Zheng, S. Ishihara, J. Reed, M. J. Lenardo, CD4+CD25+Foxp3+ regulatory T cells induce cytokine deprivation-mediated apoptosis of effector CD4+ T cells. Nat Immunol 8, 1353-1362 (2007).
[0793] 52. D. Q. Tran, D. D. Glass, G. Uzel, D. A. Darnell, C. Spalding, S. M. Holland, E. M. Shevach, Analysis of adhesion molecules, target cells, and role of IL-2 in human FOXP3+ regulatory T cell suppressor function. J Immunol 182, 2929-2938 (2009).
[0794] 53. J. D. Katz, B. Wang, K. Haskins, C. Benoist, D. Mathis, Following a diabetogenic T cell from genesis through pathogenesis. Cell 74, 1089-1100 (1993).
[0795] 54. M. S. Anderson, J. A. Bluestone, The NOD mouse: a model of immune dysregulation. Annu Rev Immunol 23, 447-485 (2005).
[0796] 55. K. Haskins, D. Wegmann, Diabetogenic T-cell clones. Diabetes 45, 1299-1305 (1996).
[0797] 56. K. Haskins, M. McDuffie, Acceleration of diabetes in young NOD mice with a CD4+ islet-specific T cell clone. Science 249, 1433-1436 (1990).
[0798] 57. M. Presa, Y. G. Chen, A. E. Grier, E. H. Leiter, M. A. Brehm, D. L. Greiner, L. D. Shultz, D. V. Serreze, The Presence and Preferential Activation of Regulatory T Cells Diminish Adoptive Transfer of Autoimmune Diabetes by Polyclonal Nonobese Diabetic (NOD) T Cell Effectors into NSG versus NOD-scid Mice. J Immunol 195, 3011-3019 (2015).
[0799] 58. Q. Tang, J. A. Bluestone, The Foxp3+ regulatory T cell: a jack of all trades, master of regulation. Nat. Immunol. 9, 239-244 (2008).
[0800] 59. J. L. McGovern, G. P. Wright, H. J. Stauss, Engineering Specificity and Function of Therapeutic Regulatory T Cells. Frontiers in immunology 8, 1517 (2017).
[0801] 60. T. Maj, W. Wang, J. Crespo, H. Zhang, W. Wang, S. Wei, L. Zhao, L. Vatan, I. Shao, W. Szeliga, C. Lyssiotis, J. R. Liu, I. Kryczek, W. Zou, Oxidative stress controls regulatory T cell apoptosis and suppressor activity and PD-L1-blockade resistance in tumor. Nat Immunol 18, 1332-1341 (2017).
[0802] 61. J. Rana, D. J. Perry, S. R. P. Kumar, M. Munoz-Melero, R. Saboungi, T. M. Brusko, M. Biswas, CAR- and TRuC-redirected regulatory T cells differ in capacity to control adaptive immunity to FVIII. Molecular therapy: the journal of the American Society of Gene Therapy 29, 2660-2676 (2021).
[0803] 62. J. Y. Tsang, K. Ratnasothy, D. Li, Y. Chen, R. P. Bucy, K. F. Lau, L. Smyth, G. Lombardi, R. Lechler, P. K. Tam, The potency of allospecific Tregs cells appears to correlate with T cell receptor functional avidity. Am J Transplant 11, 1610-1620 (2011).
[0804] 63. M. Bettini, L. Blanchfield, A. Castellaw, Q. Zhang, M. Nakayama, M. P. Smeltzer, H. Zhang, K. A. Hogquist, B. D. Evavold, D. A. Vignali, TCR affinity and tolerance mechanisms converge to shape T cell diabetogenic potential. J Immunol 193, 571-579 (2014).
[0805] 64. M. L. Sprouse, I. Shevchenko, M. A. Scavuzzo, F. Joseph, T. Lee, S. Blum, M. Borowiak, M. L. Bettini, M. Bettini, Cutting Edge: Low-Affinity TCRs Support Regulatory T Cell Function in Autoimmunity. J Immunol 200, 909-914 (2018).
[0806] 65. G. Plesa, L. Zheng, A. Medvec, C. B. Wilson, C. Robles-Oteiza, N. Liddy, A. D. Bennett, J. Gavarret, A. Vuidepot, Y. Zhao, B. R. Blazar, B. K. Jakobsen, J. L. Riley, TCR affinity and specificity requirements for human regulatory T-cell function. Blood 119, 3420-3430 (2012).
[0807] 66. W. I. Yeh, H. R. Seay, B. Newby, A. L. Posgai, F. B. Moniz, A. Michels, C. E. Mathews, J. A. Bluestone, T. M. Brusko, Avidity and Bystander Suppressive Capacity of Human Regulatory T Cells Expressing De Novo Autoreactive T-Cell Receptors in Type 1 Diabetes. Frontiers in immunology 8, 1313 (2017).
[0808] 67. R. Gastpar, C. Gross, L. Rossbacher, J. Ellwart, J. Riegger, G. Multhoff, The cell surface-localized heat shock protein 70 epitope TKD induces migration and cytolytic activity selectively in human NK cells. J Immunol 172, 972-980 (2004).

[0809] The term “comprising” as used herein is synonymous with “including,” “containing,” or “characterized by,” and is inclusive or open-ended and does not exclude additional, unrecited elements or method steps.

[0810] The above description discloses several methods and materials of the present invention. This invention is susceptible to modifications in the methods and materials, as well as alterations in the fabrication methods and equipment. Such modifications will become apparent to those skilled in the art from a consideration of this disclosure or practice of the invention disclosed herein. Consequently, it is not intended that this invention be limited to the specific embodiments disclosed herein, but that it cover all modifications and alternatives coming within the true scope and spirit of the invention.

[0811] All references cited herein, including but not limited to published and unpublished applications, patents, and literature references, are incorporated herein by reference in their entirety and are hereby made a part of this specification. To the extent publications and patents or patent applications incorporated by reference contradict the disclosure contained in the specification, the specification is intended to supersede and/or take precedence over any such contradictory material.

1.-54. (canceled)

55. An engineered regulatory T (Treg) cell comprising:
(i) a first polynucleotide in a genome of the cell, the first polynucleotide comprising a first promoter operably linked to a nucleotide sequence encoding a first chemically inducible signaling complex (CISC) component, the first CISC component comprising:
(a) a first extracellular binding domain;
(b) a first transmembrane domain; and
(c) a first cytoplasmic domain; and
(ii) a second polynucleotide in a TRAC locus of the genome, the second polynucleotide comprising second promoter operably linked to a nucleotide sequence encoding a second CISC component, the second CISC component comprising:
(a) a second extracellular binding domain;
(b) a second transmembrane domain; and
(c) a second cytoplasmic domain,
wherein dimerization of the first and second CISC components in the presence of a ligand induces a signal transduction event and proliferation of the engineered Treg cell,
wherein the first promoter is operably linked to a nucleotide sequence encoding FOXP3,
wherein:
(iii)(a)(1) the second promoter is operably linked to a nucleotide sequence encoding a chimeric antigen receptor (CAR);
(iii)(a)(2) the second promoter is operably linked to (A) a nucleotide sequence encoding a T cell receptor (TCR) alpha (TCRα) protein, and (B) a nucleotide sequence encoding a TCR beta (TCRβ) protein; or
(iii)(b) the second promoter is operably linked to (A) a nucleotide sequence encoding a TCRβ protein, and (B) a first portion of a TCRα protein, the first portion of the TCRα protein comprising a TCRα variable region and a TCRα joining region, wherein the nucleotide sequence encoding the first portion of the TCRα protein is in-frame with an endogenous nucleotide sequence encoding a second portion of the TCRα protein, the second portion comprising at least a portion of a TCRα constant region.

56. The engineered Treg cell of claim 55, wherein the second promoter is operably linked to the nucleotide sequence encoding the CAR.

57. The engineered Treg cell of claim 56, wherein the engineered Treg cell is a CD8+ Treg cell.

58. The engineered Treg cell of claim 55, wherein the engineered Treg cell is a CD4+ Treg cell.

59. The engineered Treg cell of claim 58, wherein the second promoter is operably linked to (A) the nucleotide sequence encoding the TCRα protein, and (B) the nucleotide sequence encoding the TCRβ protein.

60. The engineered Treg cell of claim 58, wherein the second promoter is operably linked to (A) the nucleotide sequence encoding the TCR protein, and (B) the first portion of the TCRα protein comprising the TCRα variable region and the TCRα joining region, wherein the nucleotide sequence encoding the first portion of the TCRα protein is in-frame with the endogenous nucleotide sequence encoding the second portion of the TCRα protein.

61. The engineered Treg cell of claim 55, wherein:
(i)(a) the first CISC component comprises, in N-to-C-terminal order, an FK506-binding protein (FKBP) domain, an IL-2 receptor gamma (IL-2Rγ) transmembrane domain, and an IL-2Rγ cytoplasmic domain, and
(i)(b) the second CISC component comprises, in N-to-C-terminal order, an FKBP-rapamycin-binding (FRB) domain, an IL-2 receptor beta (IL-2Rβ) transmembrane domain, and an IL-2Rβ cytoplasmic domain; or
(ii)(a) the first CISC component comprises, in N-to-C-terminal order, an FKBP-rapamycin-binding (FRB) domain, an IL-2 receptor beta (IL-2Rβ) transmembrane domain, and an IL-2Rβ cytoplasmic domain, and
(ii)(b) the second CISC component comprises, in N-to-C-terminal order, an FK506-binding protein (FKBP) domain, an IL-2 receptor gamma (IL-2Rγ) transmembrane domain, and an IL-2Rγ cytoplasmic domain.

62. The engineered Treg cell of claim 55, wherein the first promoter is operably linked to a first coding exon of an endogenous FOXP3 gene in the Treg cell, wherein the first promoter is downstream from a Treg-specific demethylated region (TSDR) in the endogenous FOXP3 gene.

63. The engineered Treg cell of claim 55, wherein the nucleotide sequence encoding FOXP3 is a FOXP3 cDNA sequence.

64. The engineered Treg cell of claim 55, wherein the first promoter is a constitutive promoter, and wherein the second promoter is a constitutive promoter.

65. The engineered Treg cell of claim 55, wherein the first promoter is an MND promoter, and wherein the second promoter is an MND promoter.

66. A pharmaceutical composition comprising the engineered Treg cell of claim 55, and a pharmaceutically acceptable excipient.

67. A method of producing a genetically engineered regulatory T (Treg) cell, the method comprising contacting a cell with:
(i) a first polynucleotide comprising a first promoter operably linked to a nucleotide sequence encoding a first CISC component, the first CISC component comprising:
(a) a first extracellular binding domain;
(b) a first transmembrane domain; and
(c) a first cytoplasmic domain;
and
(ii) a second polynucleotide comprising a second promoter operably linked to a nucleotide sequence encoding a second CISC component, the second CISC component comprising:
(a) a second extracellular binding domain;
(b) a second transmembrane domain; and
(c) a second cytoplasmic domain,
wherein dimerization of the first and second CISC components in the presence of a ligand induces a signal transduction event and proliferation of the cell,
wherein the first polynucleotide is inserted into a FOXP3 locus in a genome of the cell, and wherein, after insertion into the FOXP3 locus, the first promoter is operably linked to a nucleotide sequence encoding FOXP3,
wherein the second polynucleotide is inserted into a TRAC locus in the genome, and wherein, after insertion of the second polynucleotide into the TRAC locus:
(iii)(a)(1) the second promoter is operably linked to a nucleotide sequence encoding a chimeric antigen receptor (CAR);
(iii)(a)(2) the second promoter is operably linked to (A) a nucleotide sequence encoding a T cell receptor (TCR) alpha (TCRα) protein, and (B) a nucleotide sequence encoding a TCR beta (TCRβ) protein; or
(iii)(b) the second promoter is operably linked to (A) a nucleotide sequence encoding a TCRβ protein, and (B) a first portion of a TCRα protein, the first portion of the TCRα protein comprising a TCRα variable region and a TCRα joining region, wherein the nucleotide sequence encoding the first portion of the TCRα protein is in-frame with an endogenous nucleotide sequence encoding a second portion of the TCRα protein, the second portion comprising at least a portion of a TCRα constant region.

68. The method of claim 67, further comprising contacting the cell with:
(i) a first nuclease that targets the FOXP3 locus, or a nucleic acid encoding the first nuclease; and
(ii) a second nuclease that targets the TRAC locus, or a nucleic acid encoding the second nuclease.

69. The method of claim 67, further comprising contacting the cell with:
(i) an RNA-guided nuclease;
(ii) a first guide RNA (gRNA) comprising a spacer sequence that targets the FOXP3 locus or a nucleic acid encoding the first gRNA; and
(iii) a second gRNA comprising a spacer sequence that targets the TRAC locus.

70. The method of claim 67, further comprising contacting the cell with the ligand.

71. A method of treating, ameliorating, or inhibiting a disorder in a subject in need thereof, the method comprising administering the engineered Treg cell of claim 55 to a subject in need thereof.

72. The method of claim 71, wherein the disorder is selected from the group consisting of autoimmune disease, inflammatory disease, alloimmune disease, and allergic disease.

73. The method of claim 71, wherein the engineered Treg cell is autologous to the subject.

74. The method of claim 71, wherein the engineered Treg cell is allogeneic to the subject.

The application's sequence listing, which the Patent Office published only in electronic form, follows.

SEQUENCE LISTING (1455 sequences)

SEQ ID NO: 1 - protein, 20 aa, Homo sapiens
  CDR3 alpha of TCR that specifically recognizes antigen associated with pathogenesis of autoimmune, allergic, or inflammatory condition
CAVVNMDSNYQLIWGAGTKL

SEQ ID NO: 2 - protein, 18 aa, Homo sapiens
  CDR3 alpha of TCR that specifically recognizes antigen associated with pathogenesis of autoimmune, allergic, or inflammatory condition
CADAGGTSYKLFGQGTIL

SEQ ID NO: 3 - protein, 20 aa, Homo sapiens
  CDR3 alpha of TCR that specifically recognizes antigen associated with pathogenesis of autoimmune, allergic, or inflammatory condition
CIPGSEEYGNKLVFGAGTIL

SEQ ID NO: 4 - protein, 15 aa, Homo sapiens
  CDR3 alpha of TCR that specifically recognizes antigen associated with pathogenesis of autoimmune, allergic, or inflammatory condition
CAVGALAGTASKLTF

SEQ ID NO: 5 - protein, 13 aa, Homo sapiens
  CDR3 alpha of TCR that specifically recognizes antigen associated with pathogenesis of autoimmune, allergic, or inflammatory condition
CAVQAGGNNRLAF

SEQ ID NO: 6 - protein, 12 aa, Homo sapiens
  CDR3 alpha of TCR that specifically recognizes antigen associated with pathogenesis of autoimmune, allergic, or inflammatory condition
CIAIYNFNKFYF

SEQ ID NO: 7 - protein, 13 aa, Homo sapiens
  CDR3 alpha of TCR that specifically recognizes antigen associated with pathogenesis of autoimmune, allergic, or inflammatory condition
CIVSHNAGNMLTF

SEQ ID NO: 8 - protein, 12 aa, Homo sapiens
  CDR3 alpha of TCR that specifically recognizes antigen associated with pathogenesis of autoimmune, allergic, or inflammatory condition
CALKYGANNLFF

SEQ ID NO: 9 - protein, 15 aa, Homo sapiens
  CDR3 alpha of TCR that specifically recognizes antigen associated with pathogenesis of autoimmune, allergic, or inflammatory condition
CIVRVEIQGAQKLVF

SEQ ID NO: 10 - protein, 13 aa, Homo sapiens
  CDR3 alpha of TCR that specifically recognizes antigen associated with pathogenesis of autoimmune, allergic, or inflammatory condition
CAGGFSDGQKLLF

SEQ ID NO: 11 - protein, 13 aa, Homo sapiens
  CDR3 alpha of TCR that specifically recognizes antigen associated with pathogenesis of autoimmune, allergic, or inflammatory condition
CAVIETSGSRLTF

SEQ ID NO: 12 - protein, 14 aa, Homo sapiens
  CDR3 alpha of TCR that specifically recognizes antigen associated with pathogenesis of autoimmune, allergic, or inflammatory condition
CALSRAGTGNQFYF

SEQ ID NO: 13 - protein, 10 aa, Homo sapiens
  CDR3 alpha of TCR that specifically recognizes antigen associated with pathogenesis of autoimmune, allergic, or inflammatory condition
CIEYNFNKFY

SEQ ID NO: 14 - protein, 13 aa, Homo sapiens
  CDR3 alpha of TCR that specifically recognizes antigen associated with pathogenesis of autoimmune, allergic, or inflammatory condition
CIVPANTGGFKTI

SEQ ID NO: 15 - protein, 15 aa, Homo sapiens
  CDR3 alpha of TCR that specifically recognizes antigen associated with pathogenesis of autoimmune, allergic, or inflammatory condition
CALSELSIQGAQKLV

SEQ ID NO: 16 - protein, 12 aa, Homo sapiens
  CDR3 alpha of TCR that specifically recognizes antigen associated with pathogenesis of autoimmune, allergic, or inflammatory condition
CVVNSWAGNQFY

SEQ ID NO: 17 - protein, 13 aa, Homo sapiens
  CDR3 alpha of TCR that specifically recognizes antigen associated with pathogenesis of autoimmune, allergic, or inflammatory condition
CALSESGANSKLT

SEQ ID NO: 18 - protein, 9 aa, Homo sapiens
IVYGGFKTI

SEQ ID NO: 19 - protein, 14 aa, Homo sapiens
CLVGHGSSNTGKLI

SEQ ID NO: 20 - protein, 14 aa, Homo sapiens
  CDR3 alpha of TCR that specifically recognizes antigen associated with pathogenesis of autoimmune, allergic, or inflammatory condition
CAVRDPLYNFNKFY

SEQ ID NO: 21 - protein, 11 aa, Homo sapiens
  CDR3 alpha of TCR that specifically recognizes antigen associated with pathogenesis of autoimmune, allergic, or inflammatory condition
CLVGGGADGLT

SEQ ID NO: 22 - protein, 10 aa, Homo sapiens
  CDR3 alpha of TCR that specifically recognizes antigen associated with pathogenesis of autoimmune, allergic, or inflammatory condition
CAGDSGYALN

SEQ ID NO: 23 - protein, 13 aa, Homo sapiens
  CDR3 alpha of TCR that specifically recognizes antigen associated with pathogenesis of autoimmune, allergic, or inflammatory condition
CAVSGGGADGLTF

SEQ ID NO: 24 - protein, 12 aa, Homo sapiens
  CDR3 alpha of TCR that specifically recognizes antigen associated with pathogenesis of autoimmune, allergic, or inflammatory condition
CAGSGGYQKVTF

SEQ ID NO: 25 - protein, 12 aa, Homo sapiens
  CDR3 alpha of TCR that specifically recognizes antigen associated with pathogenesis of autoimmune, allergic, or inflammatory condition
CAGSGGYQKVTF

SEQ ID NO: 26 - protein, 12 aa, Homo sapiens
  CDR3 alpha of TCR that specifically recognizes antigen associated with pathogenesis of autoimmune, allergic, or inflammatory condition
CAGSGGYQKVTF

SEQ ID NO: 27 - protein, 17 aa, Homo sapiens
  CDR3 alpha of TCR that specifically recognizes antigen associated with pathogenesis of autoimmune, allergic, or inflammatory condition
CILRDVWSNFGNEKLTF

SEQ ID NO: 28 - protein, 16 aa, Homo sapiens
  CDR3 alpha of TCR that specifically recognizes antigen associated with pathogenesis of autoimmune, allergic, or inflammatory condition
CILRDVWSNFGNEKLT

SEQ ID NO: 29 - protein, 12 aa, Homo sapiens
  CDR3 alpha of TCR that specifically recognizes antigen associated with pathogenesis of autoimmune, allergic, or inflammatory condition
CAGSGGYQKVTF

SEQ ID NO: 30 - protein, 12 aa, Homo sapiens
  CDR3 alpha of TCR that specifically recognizes antigen associated with pathogenesis of autoimmune, allergic, or inflammatory condition
CALQTGANNLFF

SEQ ID NO: 31 - protein, 11 aa, Homo sapiens
  CDR3 alpha of TCR that specifically recognizes antigen associated with pathogenesis of autoimmune, allergic, or inflammatory condition
CAVNTGNQFYF

SEQ ID NO: 32 - protein, 11 aa, Homo sapiens
  CDR3 alpha of TCR that specifically recognizes antigen associated with pathogenesis of autoimmune, allergic, or inflammatory condition
CAVNTGNQFYF

SEQ ID NO: 33 - protein, 11 aa, Homo sapiens
  CDR3 alpha of TCR that specifically recognizes antigen associated with pathogenesis of autoimmune, allergic, or inflammatory condition
CAALNTDKLIF

SEQ ID NO: 34 - protein, 13 aa, Homo sapiens
  CDR3 alpha of TCR that specifically recognizes antigen associated with pathogenesis of autoimmune, allergic, or inflammatory condition
CVANKILQASKLF

SEQ ID NO: 35 - protein, 12 aa, Homo sapiens
  CDR3 alpha of TCR that specifically recognizes antigen associated with pathogenesis of autoimmune, allergic, or inflammatory condition
CAGSGGYQKVTF

SEQ ID NO: 36 - protein, 17 aa, Homo sapiens
  CDR3 alpha of TCR that specifically recognizes antigen associated with pathogenesis of autoimmune, allergic, or inflammatory condition
CILRDVWSNFGNEKLTF

SEQ ID NO: 37 - protein, 12 aa, Homo sapiens
  CDR3 alpha of TCR that specifically recognizes antigen associated with pathogenesis of autoimmune, allergic, or inflammatory condition
CAGSGGYQKVTF

SEQ ID NO: 38 - protein, 15 aa, Homo sapiens
  CDR3 alpha of TCR that specifically recognizes antigen associated with pathogenesis of autoimmune, allergic, or inflammatory condition
CAYRSGYMEYGNKLV

SEQ ID NO: 39 - protein, 12 aa, Homo sapiens
  CDR3 alpha of TCR that specifically recognizes antigen associated with pathogenesis of autoimmune, allergic, or inflammatory condition
CLVGDNDYKLSF

SEQ ID NO: 40 - protein, 14 aa, Homo sapiens
  CDR3 alpha of TCR that specifically recognizes antigen associated with pathogenesis of autoimmune, allergic, or inflammatory condition
CAVELGDSWGKFQF

SEQ ID NO: 41 - protein, 13 aa, Homo sapiens
  CDR3 alpha of TCR that specifically recognizes antigen associated with pathogenesis of autoimmune, allergic, or inflammatory condition
CAAPGGATNKLIF

SEQ ID NO: 42 - protein, 15 aa, Homo sapiens
  CDR3 alpha of TCR that specifically recognizes antigen associated with pathogenesis of autoimmune, allergic, or inflammatory condition
CAVGWEDGTASKLTF

SEQ ID NO: 43 - protein, 18 aa, Homo sapiens
  CDR3 alpha of TCR that specifically recognizes antigen associated with pathogenesis of autoimmune, allergic, or inflammatory condition
CLVGDGGSFSGGYNKLIF

SEQ ID NO: 44 - protein, 14 aa, Homo sapiens
  CDR3 alpha of TCR that specifically recognizes antigen associated with pathogenesis of autoimmune, allergic, or inflammatory condition
CAVQADGNTGKLIF

SEQ ID NO: 45 - protein, 13 aa, Homo sapiens
  CDR3 alpha of TCR that specifically recognizes antigen associated with pathogenesis of autoimmune, allergic, or inflammatory condition
CAFIGGSNYKLTF

SEQ ID NO: 46 - protein, 12 aa, Homo sapiens
  CDR3 alpha of TCR that specifically recognizes antigen associated with pathogenesis of autoimmune, allergic, or inflammatory condition
CAGPYNTDKLIF

SEQ ID NO: 47 - protein, 16 aa, Homo sapiens
  CDR3 alpha of TCR that specifically recognizes antigen associated with pathogenesis of autoimmune, allergic, or inflammatory condition
CAASANYGGATNKLIF

SEQ ID NO: 48 - protein, 14 aa, Homo sapiens
  CDR3 alpha of TCR that specifically recognizes antigen associated with pathogenesis of autoimmune, allergic, or inflammatory condition
CAVTLGGGSEKLVF

SEQ ID NO: 49 - protein, 13 aa, Homo sapiens
  CDR3 alpha of TCR that specifically recognizes antigen associated with pathogenesis of autoimmune, allergic, or inflammatory condition
CAVGAGSNYQLIW

SEQ ID NO: 50 - protein, 14 aa, Homo sapiens
  CDR3 alpha of TCR that specifically recognizes antigen associated with pathogenesis of autoimmune, allergic, or inflammatory condition
CLVAGAGGYNKLIF

SEQ ID NO: 51 - protein, 13 aa, Homo sapiens
  CDR3 alpha of TCR that specifically recognizes antigen associated with pathogenesis of autoimmune, allergic, or inflammatory condition
CAGPSGATNKLIF

SEQ ID NO: 52 - protein, 12 aa, Homo sapiens
  CDR3 alpha of TCR that specifically recognizes antigen associated with pathogenesis of autoimmune, allergic, or inflammatory condition
CIVLGGADGLTF

SEQ ID NO: 53 - protein, 13 aa, Homo sapiens
  CDR3 alpha of TCR that specifically recognizes antigen associated with pathogenesis of autoimmune, allergic, or inflammatory condition
CIVWGGATNKLIF

SEQ ID NO: 54 - protein, 12 aa, Homo sapiens
  CDR3 alpha of TCR that specifically recognizes antigen associated with pathogenesis of autoimmune, allergic, or inflammatory condition
CIAFQGAQKLVF

SEQ ID NO: 55 - protein, 13 aa, Homo sapiens
  CDR3 alpha of TCR that specifically recognizes antigen associated with pathogenesis of autoimmune, allergic, or inflammatory condition
CLVGEAAGNKLTF

SEQ ID NO: 56 - protein, 14 aa, Homo sapiens
  CDR3 alpha of TCR that specifically recognizes antigen associated with pathogenesis of autoimmune, allergic, or inflammatory condition
CAVGRGGSQGNLIF

SEQ ID NO: 57 - protein, 16 aa, Homo sapiens
  CDR3 alpha of TCR that specifically recognizes antigen associated with pathogenesis of autoimmune, allergic, or inflammatory condition
CAMREGRGAGSYQLTF

SEQ ID NO: 58 - protein, 14 aa, Homo sapiens
  CDR3 alpha of TCR that specifically recognizes antigen associated with pathogenesis of autoimmune, allergic, or inflammatory condition
CAMSVLSGTYKYIF

SEQ ID NO: 59 - protein, 12 aa, Homo sapiens
  CDR3 alpha of TCR that specifically recognizes antigen associated with pathogenesis of autoimmune, allergic, or inflammatory condition
CAGSGGYQKVTF

SEQ ID NO: 60 - protein, 11 aa, Homo sapiens
  CDR3 alpha of TCR that specifically recognizes antigen associated with pathogenesis of autoimmune, allergic, or inflammatory condition
CAVNTGNQFYF

SEQ ID NO: 61 - protein, 12 aa, Homo sapiens
  CDR3 alpha of TCR that specifically recognizes antigen associated with pathogenesis of autoimmune, allergic, or inflammatory condition
CAGSGGYQKVTF

SEQ ID NO: 62 - protein, 12 aa, Homo sapiens
  CDR3 alpha of TCR that specifically recognizes antigen associated with pathogenesis of autoimmune, allergic, or inflammatory condition
CAGSGGYQKVTF

SEQ ID NO: 63 - protein, 14 aa, Homo sapiens
  CDR3 alpha of TCR that specifically recognizes antigen associated with pathogenesis of autoimmune, allergic, or inflammatory condition
CAVEDSGGYQKVTF

SEQ ID NO: 64 - protein, 12 aa, Homo sapiens
  CDR3 alpha of TCR that specifically recognizes antigen associated with pathogenesis of autoimmune, allergic, or inflammatory condition
CALQTGANNLFF

SEQ ID NO: 65 - protein, 17 aa, Homo sapiens
  CDR3 alpha of TCR that specifically recognizes antigen associated with pathogenesis of autoimmune, allergic, or inflammatory condition
CILRDVWSNFGNEKLTF

SEQ ID NO: 66 - protein, 8 aa, Homo sapiens
  CDR3 alpha of TCR that specifically recognizes antigen associated with pathogenesis of autoimmune, allergic, or inflammatory condition
CDSGDMRF

SEQ ID NO: 67 - protein, 12 aa, Homo sapiens
  CDR3 alpha of TCR that specifically recognizes antigen associated with pathogenesis of autoimmune, allergic, or inflammatory condition
CAGSGGYQKVTF

SEQ ID NO: 68 - protein, 12 aa, Homo sapiens
  CDR3 alpha of TCR that specifically recognizes antigen associated with pathogenesis of autoimmune, allergic, or inflammatory condition
CALQTGANNLFF

SEQ ID NO: 69 - protein, 12 aa, Homo sapiens
  CDR3 alpha of TCR that specifically recognizes antigen associated with pathogenesis of autoimmune, allergic, or inflammatory condition
CALQTGANNLFF

SEQ ID NO: 70 - protein, 12 aa, Homo sapiens
  CDR3 alpha of TCR that specifically recognizes antigen associated with pathogenesis of autoimmune, allergic, or inflammatory condition
CALQTGANNLFF

SEQ ID NO: 71 - protein, 15 aa, Homo sapiens
  CDR3 alpha of TCR that specifically recognizes antigen associated with pathogenesis of autoimmune, allergic, or inflammatory condition
CAASEGDSGTYKYIF

SEQ ID NO: 72 - protein, 14 aa, Homo sapiens
  CDR3 alpha of TCR that specifically recognizes antigen associated with pathogenesis of autoimmune, allergic, or inflammatory condition
CAVKFASGTYKYIF

SEQ ID NO: 73 - protein, 15 aa, Homo sapiens
  CDR3 alpha of TCR that specifically recognizes antigen associated with pathogenesis of autoimmune, allergic, or inflammatory condition
CAMREGWQAGNTLIF

SEQ ID NO: 74 - protein, 12 aa, Homo sapiens
  CDR3 alpha of TCR that specifically recognizes antigen associated with pathogenesis of autoimmune, allergic, or inflammatory condition
CAVVDASSKLIF

SEQ ID NO: 75 - protein, 13 aa, Homo sapiens
  CDR3 alpha of TCR that specifically recognizes antigen associated with pathogenesis of autoimmune, allergic, or inflammatory condition
CLVGGYNNNDMRF

SEQ ID NO: 76 - protein, 14 aa, Homo sapiens
  CDR3 alpha of TCR that specifically recognizes antigen associated with pathogenesis of autoimmune, allergic, or inflammatory condition
CAESRYSGYSTLTF

SEQ ID NO: 77 - protein, 12 aa, Homo sapiens
  CDR3 alpha of TCR that specifically recognizes antigen associated with pathogenesis of autoimmune, allergic, or inflammatory condition
CALSEYGNKLVF

SEQ ID NO: 78 - protein, 17 aa, Homo sapiens
  CDR3 beta of TCR that specifically recognizes antigen associated with pathogenesis of autoimmune, allergic, or inflammatory condition
CASSLATSGGGSDTQYF

SEQ ID NO: 79 - protein, 17 aa, Homo sapiens
  CDR3 beta of TCR that specifically recognizes antigen associated with pathogenesis of autoimmune, allergic, or inflammatory condition
CASSLATSGGGSDTQYF

SEQ ID NO: 80 - protein, 17 aa, Homo sapiens
  CDR3 beta of TCR that specifically recognizes antigen associated with pathogenesis of autoimmune, allergic, or inflammatory condition
CASSLATSGGGSDTQYF

SEQ ID NO: 81 - protein, 13 aa, Homo sapiens
  CDR3 beta of TCR that specifically recognizes antigen associated with pathogenesis of autoimmune, allergic, or inflammatory condition
CSVEATRADTQYF

SEQ ID NO: 82 - protein, 12 aa, Homo sapiens
  CDR3 beta of TCR that specifically recognizes antigen associated with pathogenesis of autoimmune, allergic, or inflammatory condition
CASSLERDGYTF

SEQ ID NO: 83 - protein, 16 aa, Homo sapiens
  CDR3 beta of TCR that specifically recognizes antigen associated with pathogenesis of autoimmune, allergic, or inflammatory condition
CASSLEASSYNSPLHF

SEQ ID NO: 84 - protein, 12 aa, Homo sapiens
  CDR3 beta of TCR that specifically recognizes antigen associated with pathogenesis of autoimmune, allergic, or inflammatory condition
CASSLERETQYF

SEQ ID NO: 85 - protein, 14 aa, Homo sapiens
  CDR3 beta of TCR that specifically recognizes antigen associated with pathogenesis of autoimmune, allergic, or inflammatory condition
CASSPTTGGDEAFF

SEQ ID NO: 86 - protein, 15 aa, Homo sapiens
  CDR3 beta of TCR that specifically recognizes antigen associated with pathogenesis of autoimmune, allergic, or inflammatory condition
CASSLGPGQRETQYF

SEQ ID NO: 87 - protein, 12 aa, Homo sapiens
  CDR3 beta of TCR that specifically recognizes antigen associated with pathogenesis of autoimmune, allergic, or inflammatory condition
CSARTEAYEQYF

SEQ ID NO: 88 - protein, 14 aa, Homo sapiens
  CDR3 beta of TCR that specifically recognizes antigen associated with pathogenesis of autoimmune, allergic, or inflammatory condition
CSARDQQRVDTQYF

SEQ ID NO: 89 - protein, 15 aa, Homo sapiens
  CDR3 beta of TCR that specifically recognizes antigen associated with pathogenesis of autoimmune, allergic, or inflammatory condition
CASSLGLRGENIQYF

SEQ ID NO: 90 - protein, 12 aa, Homo sapiens
  CDR3 beta of TCR that specifically recognizes antigen associated with pathogenesis of autoimmune, allergic, or inflammatory condition
CASRPVAGLPHF

SEQ ID NO: 91 - protein, 13 aa, Homo sapiens
  CDR3 beta of TCR that specifically recognizes antigen associated with pathogenesis of autoimmune, allergic, or inflammatory condition
CASSFRSTDTQYF

SEQ ID NO: 92 - protein, 15 aa, Homo sapiens
  CDR3 beta of TCR that specifically recognizes antigen associated with pathogenesis of autoimmune, allergic, or inflammatory condition
CASSIVDRGGETQYF

SEQ ID NO: 93 - protein, 15 aa, Homo sapiens
  CDR3 beta of TCR that specifically recognizes antigen associated with pathogenesis of autoimmune, allergic, or inflammatory condition
CASSLGYGVSTGELF

SEQ ID NO: 94 - protein, 13 aa, Homo sapiens
  CDR3 beta of TCR that specifically recognizes antigen associated with pathogenesis of autoimmune, allergic, or inflammatory condition
CASSLRAWETQYF

SEQ ID NO: 95 - protein, 13 aa, Homo sapiens
  CDR3 beta of TCR that specifically recognizes antigen associated with pathogenesis of autoimmune, allergic, or inflammatory condition
CASSLRSTDTQYF

SEQ ID NO: 96 - protein, 14 aa, Homo sapiens
  CDR3 beta of TCR that specifically recognizes antigen associated with pathogenesis of autoimmune, allergic, or inflammatory condition
CASSLRWGDGGKLF

SEQ ID NO: 97 - protein, 15 aa, Homo sapiens
  CDR3 beta of TCR that specifically recognizes antigen associated with pathogenesis of autoimmune, allergic, or inflammatory condition
CASSQGGDRGESEAF

SEQ ID NO: 98 - protein, 14 aa, Homo sapiens
  CDR3 beta of TCR that specifically recognizes antigen associated with pathogenesis of autoimmune, allergic, or inflammatory condition
CASSVRTLDTGELF

SEQ ID NO: 99 - protein, 14 aa, Homo sapiens
  CDR3 beta of TCR that specifically recognizes antigen associated with pathogenesis of autoimmune, allergic, or inflammatory condition
CATSSRMGGDTQYF

SEQ ID NO: 100 - protein, 13 aa, Homo sapiens
  CDR3 beta of TCR that specifically recognizes antigen associated with pathogenesis of autoimmune, allergic, or inflammatory condition
CASSPGTSYEQYF

SEQ ID NO: 101 - protein, 13 aa, Homo sapiens
  CDR3 beta of TCR that specifically recognizes antigen associated with pathogenesis of autoimmune, allergic, or inflammatory condition
CASAGPGANVLTF

SEQ ID NO: 102 - protein, 19 aa, Homo sapiens
  CDR3 beta of TCR that specifically recognizes antigen associated with pathogenesis of autoimmune, allergic, or inflammatory condition
CASGQVLSSGSNPSDTQYF

SEQ ID NO: 103 - protein, 12 aa, Homo sapiens
  CDR3 beta of TCR that specifically recognizes antigen associated with pathogenesis of autoimmune, allergic, or inflammatory condition
CASKGTVYNEQF

SEQ ID NO: 104 - protein, 14 aa, Homo sapiens
  CDR3 beta of TCR that specifically recognizes antigen associated with pathogenesis of autoimmune, allergic, or inflammatory condition
CASRKDSSGNTIYF

SEQ ID NO: 105 - protein, 14 aa, Homo sapiens
  CDR3 beta of TCR that specifically recognizes antigen associated with pathogenesis of autoimmune, allergic, or inflammatory condition
CASRKDSSGNTIYF

SEQ ID NO: 106 - protein, 11 aa, Homo sapiens
  CDR3 beta of TCR that specifically recognizes antigen associated with pathogenesis of autoimmune, allergic, or inflammatory condition
CASSFTEGYTF

SEQ ID NO: 107 - protein, 13 aa, Homo sapiens
  CDR3 beta of TCR that specifically recognizes antigen associated with pathogenesis of autoimmune, allergic, or inflammatory condition
CASSGRALYNEQF

SEQ ID NO: 108 - protein, 11 aa, Homo sapiens
  CDR3 beta of TCR that specifically recognizes antigen associated with pathogenesis of autoimmune, allergic, or inflammatory condition
CASSLALHEQF

SEQ ID NO: 109 - protein, 13 aa, Homo sapiens
  CDR3 beta of TCR that specifically recognizes antigen associated with pathogenesis of autoimmune, allergic, or inflammatory condition
CASSLLMAAGYTF

SEQ ID NO: 110 - protein, 13 aa, Homo sapiens
  CDR3 beta of TCR that specifically recognizes antigen associated with pathogenesis of autoimmune, allergic, or inflammatory condition
CASSLVGRDTEAF

SEQ ID NO: 111 - protein, 14 aa, Homo sapiens
  CDR3 beta of TCR that specifically recognizes antigen associated with pathogenesis of autoimmune, allergic, or inflammatory condition
CASSNGQGAETQYF

SEQ ID NO: 112 - protein, 11 aa, Homo sapiens
  CDR3 beta of TCR that specifically recognizes antigen associated with pathogenesis of autoimmune, allergic, or inflammatory condition
CASSLAGGEPF

SEQ ID NO: 113 - protein, 14 aa, Homo sapiens
  CDR3 beta of TCR that specifically recognizes antigen associated with pathogenesis of autoimmune, allergic, or inflammatory condition
CFSRPITDRNEQNF

SEQ ID NO: 114 - protein, 11 aa, Homo sapiens
  CDR3 beta of TCR that specifically recognizes antigen associated with pathogenesis of autoimmune, allergic, or inflammatory condition
CPSPLVGGGRF

SEQ ID NO: 115 - protein, 14 aa, Homo sapiens
  CDR3 beta of TCR that specifically recognizes antigen associated with pathogenesis of autoimmune, allergic, or inflammatory condition
CSVSGGPSTDTQYF

SEQ ID NO: 116 - protein, 12 aa, Homo sapiens
  CDR3 beta of TCR that specifically recognizes antigen associated with pathogenesis of autoimmune, allergic, or inflammatory condition
CSVGQTDSPLHF

SEQ ID NO: 117 - protein, 13 aa, Homo sapiens
  CDR3 beta of TCR that specifically recognizes antigen associated with pathogenesis of autoimmune, allergic, or inflammatory condition
CSAGQGGTGELFF

SEQ ID NO: 118 - protein, 15 aa, Homo sapiens
  CDR3 beta of TCR that specifically recognizes antigen associated with pathogenesis of autoimmune, allergic, or inflammatory condition
CSVAALAGFQETQYF

SEQ ID NO: 119 - protein, 14 aa, Homo sapiens
  CDR3 beta of TCR that specifically recognizes antigen associated with pathogenesis of autoimmune, allergic, or inflammatory condition
CSASRWRSTDTQYF

SEQ ID NO: 120 - protein, 13 aa, Homo sapiens
  CDR3 beta of TCR that specifically recognizes antigen associated with pathogenesis of autoimmune, allergic, or inflammatory condition
CSAGVGGQETQYF

SEQ ID NO: 121 - protein, 14 aa, Homo sapiens
  CDR3 beta of TCR that specifically recognizes antigen associated with pathogenesis of autoimmune, allergic, or inflammatory condition
CSAYRTWDQETQYF

SEQ ID NO: 122 - protein, 14 aa, Homo sapiens
  CDR3 beta of TCR that specifically recognizes antigen associated with pathogenesis of autoimmune, allergic, or inflammatory condition
CSAREPDNTGELFF

SEQ ID NO: 123 - protein, 16 aa, Homo sapiens
  CDR3 beta of TCR that specifically recognizes antigen associated with pathogenesis of autoimmune, allergic, or inflammatory condition
CASSLASAGGTDTQYF

SEQ ID NO: 124 - protein, 13 aa, Homo sapiens
  CDR3 beta of TCR that specifically recognizes antigen associated with pathogenesis of autoimmune, allergic, or inflammatory condition
CASSLNWDTEAFF

SEQ ID NO: 125 - protein, 14 aa, Homo sapiens
  CDR3 beta of TCR that specifically recognizes antigen associated with pathogenesis of autoimmune, allergic, or inflammatory condition
CASSFSPAGSEAFF

SEQ ID NO: 126 - protein, 15 aa, Homo sapiens
  CDR3 beta of TCR that specifically recognizes antigen associated with pathogenesis of autoimmune, allergic, or inflammatory condition
CASSLEGQGASEQFF

SEQ ID NO: 127 - protein, 16 aa, Homo sapiens
  CDR3 beta of TCR that specifically recognizes antigen associated with pathogenesis of autoimmune, allergic, or inflammatory condition
CASSQGLAGVQETQYF

SEQ ID NO: 128 - protein, 15 aa, Homo sapiens
  CDR3 beta of TCR that specifically recognizes antigen associated with pathogenesis of autoimmune, allergic, or inflammatory condition
CASSPTALGTDTQYF

SEQ ID NO: 129 - protein, 13 aa, Homo sapiens
  CDR3 beta of TCR that specifically recognizes antigen associated with pathogenesis of autoimmune, allergic, or inflammatory condition
CASSFRFTDTQYF

SEQ ID NO: 130 - protein, 13 aa, Homo sapiens
  CDR3 beta of TCR that specifically recognizes antigen associated with pathogenesis of autoimmune, allergic, or inflammatory condition
CASSVRSTDTQYF

SEQ ID NO: 131 - protein, 15 aa, Homo sapiens
  CDR3 beta of TCR that specifically recognizes antigen associated with pathogenesis of autoimmune, allergic, or inflammatory condition
CASSFRALAADTQYF

SEQ ID NO: 132 - protein, 15 aa, Homo sapiens
  CDR3 beta of TCR that specifically recognizes antigen associated with pathogenesis of autoimmune, allergic, or inflammatory condition
CASSIRTSGDHEQYF

SEQ ID NO: 133 - protein, 18 aa, Homo sapiens
  CDR3 beta of TCR that specifically recognizes antigen associated with pathogenesis of autoimmune, allergic, or inflammatory condition
CASSQYQSLVRGNNEQFF

SEQ ID NO: 134 - protein, 14 aa, Homo sapiens
  CDR3 beta of TCR that specifically recognizes antigen associated with pathogenesis of autoimmune, allergic, or inflammatory condition
CASSFPQVTDTQYF

SEQ ID NO: 135 - protein, 15 aa, Homo sapiens
  CDR3 beta of TCR that specifically recognizes antigen associated with pathogenesis of autoimmune, allergic, or inflammatory condition
CASSHVDRGGETQYF

SEQ ID NO: 136 - protein, 13 aa, Homo sapiens
  CDR3 beta of TCR that specifically recognizes antigen associated with pathogenesis of autoimmune, allergic, or inflammatory condition
CAIRAGTGEYEQF

SEQ ID NO: 137 - protein, 18 aa, Homo sapiens
  CDR3 beta of TCR that specifically recognizes antigen associated with pathogenesis of autoimmune, allergic, or inflammatory condition
CASGGGSVGQGVFDGYTF

SEQ ID NO: 138 - protein, 12 aa, Homo sapiens
  CDR3 beta of TCR that specifically recognizes antigen associated with pathogenesis of autoimmune, allergic, or inflammatory condition
CASKGTVYNEQF

SEQ ID NO: 139 - protein, 18 aa, Homo sapiens
  CDR3 beta of TCR that specifically recognizes antigen associated with pathogenesis of autoimmune, allergic, or inflammatory condition
CASRDPGQRGYATNEKLF

SEQ ID NO: 140 - protein, 14 aa, Homo sapiens
  CDR3 beta of TCR that specifically recognizes antigen associated with pathogenesis of autoimmune, allergic, or inflammatory condition
CASRKDSSGNTIYF

SEQ ID NO: 141 - protein, 11 aa, Homo sapiens
  CDR3 beta of TCR that specifically recognizes antigen associated with pathogenesis of autoimmune, allergic, or inflammatory condition
CASRLAGGEQF

SEQ ID NO: 142 - protein, 12 aa, Homo sapiens
  CDR3 beta of TCR that specifically recognizes antigen associated with pathogenesis of autoimmune, allergic, or inflammatory condition
CASSLAIVREQF

SEQ ID NO: 143 - protein, 13 aa, Homo sapiens
  CDR3 beta of TCR that specifically recognizes antigen associated with pathogenesis of autoimmune, allergic, or inflammatory condition
CASSSGTVNTEAF

SEQ ID NO: 144 - protein, 17 aa, Homo sapiens
  CDR3 beta of TCR that specifically recognizes antigen associated with pathogenesis of autoimmune, allergic, or inflammatory condition
CSARVRDRGLGANVLTF

SEQ ID NO: 145 - protein, 11 aa, Homo sapiens
  CDR3 beta of TCR that specifically recognizes antigen associated with pathogenesis of autoimmune, allergic, or inflammatory condition
CASQGALTSTF

SEQ ID NO: 146 - protein, 7 aa, Homo sapiens
  CDR3 beta of TCR that specifically recognizes antigen associated with pathogenesis of autoimmune, allergic, or inflammatory condition
CASRRPG

SEQ ID NO: 147 - protein, 13 aa, Homo sapiens
CASSLAGSRERYF

SEQ ID NO: 148 - protein, 14 aa, Homo sapiens
  CDR3 beta of TCR that specifically recognizes antigen associated with pathogenesis of autoimmune, allergic, or inflammatory condition
CASSINALVGEQFF

SEQ ID NO: 149 - protein, 14 aa, Homo sapiens
  CDR3 beta of TCR that specifically recognizes antigen associated with pathogenesis of autoimmune, allergic, or inflammatory condition
CASSPAFSTDTQYF

SEQ ID NO: 150 - protein, 15 aa, Homo sapiens
  CDR3 beta of TCR that specifically recognizes antigen associated with pathogenesis of autoimmune, allergic, or inflammatory condition
CASSLDGLTNTEAFF

SEQ ID NO: 151 - protein, 13 aa, Homo sapiens
  CDR3 beta of TCR that specifically recognizes antigen associated with pathogenesis of autoimmune, allergic, or inflammatory condition
CSATLGGDYGYTF

SEQ ID NO: 152 - protein, 15 aa, Homo sapiens
  CDR3 beta of TCR that specifically recognizes antigen associated with pathogenesis of autoimmune, allergic, or inflammatory condition
CSAQLAGGGGDTQYF

SEQ ID NO: 153 - protein, 13 aa, Homo sapiens
  CDR3 beta of TCR that specifically recognizes antigen associated with pathogenesis of autoimmune, allergic, or inflammatory condition
CSAFPGGDTEAFF

SEQ ID NO: 154 - protein, 15 aa, Homo sapiens
  CDR3 beta of TCR that specifically recognizes antigen associated with pathogenesis of autoimmune, allergic, or inflammatory condition
CASSYVGGDTDTQYF

SEQ ID NO: 155 - protein, 13 aa, Homo sapiens
  CDR3 alpha of TCR that specifically recognizes antigen associated with pathogenesis of autoimmune, allergic, or inflammatory condition
CAMGETGGPKTIF

SEQ ID NO: 156 - protein, 12 aa, Homo sapiens
  CDR3 alpha of TCR that specifically recognizes antigen associated with pathogenesis of autoimmune, allergic, or inflammatory condition
CAVNTGFQKLVF

SEQ ID NO: 157 - protein, 13 aa, Homo sapiens
  CDR3 alpha of TCR that specifically recognizes antigen associated with pathogenesis of autoimmune, allergic, or inflammatory condition
CAVRGGGADGLTF

SEQ ID NO: 158 - protein, 19 aa, Homo sapiens
  CDR3 alpha of TCR that specifically recognizes antigen associated with pathogenesis of autoimmune, allergic, or inflammatory condition
CALESLLLIKETSGSRLTF

SEQ ID NO: 159 - protein, 15 aa, Homo sapiens
  CDR3 alpha of TCR that specifically recognizes antigen associated with pathogenesis of autoimmune, allergic, or inflammatory condition
CAAKTGYSSASKIIF

SEQ ID NO: 160 - protein, 19 aa, Homo sapiens
  CDR3 alpha of TCR that specifically recognizes antigen associated with pathogenesis of autoimmune, allergic, or inflammatory condition
CAADEFVRNYGGATNKLIF

SEQ ID NO: 161 - protein, 17 aa, Homo sapiens
  CDR3 alpha of TCR that specifically recognizes antigen associated with pathogenesis of autoimmune, allergic, or inflammatory condition
CAPPPRAGGTSYGKLTF

SEQ ID NO: 162 - protein, 13 aa, Homo sapiens
  CDR3 alpha of TCR that specifically recognizes antigen associated with pathogenesis of autoimmune, allergic, or inflammatory condition
CALRVYNFNKFYF

SEQ ID NO: 163 - protein, 17 aa, Homo sapiens
  CDR3 alpha of TCR that specifically recognizes antigen associated with pathogenesis of autoimmune, allergic, or inflammatory condition
CAVNIVGTQGGSEKLVF

SEQ ID NO: 164 - protein, 15 aa, Homo sapiens
  CDR3 alpha of TCR that specifically recognizes antigen associated with pathogenesis of autoimmune, allergic, or inflammatory condition
CALSPLNQAGTALIF

SEQ ID NO: 165 - protein, 15 aa, Homo sapiens
  CDR3 alpha of TCR that specifically recognizes antigen associated with pathogenesis of autoimmune, allergic, or inflammatory condition
CALSPLNQAGTALIF

SEQ ID NO: 166 - protein, 15 aa, Homo sapiens
  CDR3 alpha of TCR that specifically recognizes antigen associated with pathogenesis of autoimmune, allergic, or inflammatory condition
CAASRKDRTASKLTF

SEQ ID NO: 167 - protein, 15 aa, Homo sapiens
  CDR3 alpha of TCR that specifically recognizes antigen associated with pathogenesis of autoimmune, allergic, or inflammatory condition
CAASMGLNSGYALNF

SEQ ID NO: 168 - protein, 17 aa, Homo sapiens
  CDR3 alpha of TCR that specifically recognizes antigen associated with pathogenesis of autoimmune, allergic, or inflammatory condition
CAENRGAGGTSYGKLTF

SEQ ID NO: 169 - protein, 14 aa, Homo sapiens
  CDR3 alpha of TCR that specifically recognizes antigen associated with pathogenesis of autoimmune, allergic, or inflammatory condition
CAEMMNSGYSTLTF

SEQ ID NO: 170 - protein, 17 aa, Homo sapiens
  CDR3 alpha of TCR that specifically recognizes antigen associated with pathogenesis of autoimmune, allergic, or inflammatory condition
CAMRDLYSGAGSYQLTF

SEQ ID NO: 171 - protein, 13 aa, Homo sapiens
  CDR3 alpha of TCR that specifically recognizes antigen associated with pathogenesis of autoimmune, allergic, or inflammatory condition
CAVPVYNTDKLIF

SEQ ID NO: 172 - protein, 13 aa, Homo sapiens
  CDR3 alpha of TCR that specifically recognizes antigen associated with pathogenesis of autoimmune, allergic, or inflammatory condition
ATDAGYNQGGKLI

SEQ ID NO: 173 - protein, 14 aa, Homo sapiens
  CDR3 alpha of TCR that specifically recognizes antigen associated with pathogenesis of autoimmune, allergic, or inflammatory condition
CAASKASNTGKLIF

SEQ ID NO: 174 - protein, 15 aa, Homo sapiens
  CDR3 alpha of TCR that specifically recognizes antigen associated with pathogenesis of autoimmune, allergic, or inflammatory condition
CASSRGGGNTGELFF

SEQ ID NO: 175 - protein, 13 aa, Homo sapiens
  CDR3 alpha of TCR that specifically recognizes antigen associated with pathogenesis of autoimmune, allergic, or inflammatory condition
CALSDVGYQKVTF

SEQ ID NO: 176 - protein, 12 aa, Homo sapiens
  CDR3 alpha of TCR that specifically recognizes antigen associated with pathogenesis of autoimmune, allergic, or inflammatory condition
CAVGMGYQKVTF

SEQ ID NO: 177 - protein, 17 aa, Homo sapiens
  CDR3 alpha of TCR that specifically recognizes antigen associated with pathogenesis of autoimmune, allergic, or inflammatory condition
CAVEDLGSGAGSYQLTF

SEQ ID NO: 178 - protein, 14 aa, Homo sapiens
  CDR3 alpha of TCR that specifically recognizes antigen associated with pathogenesis of autoimmune, allergic, or inflammatory condition
CALEGMGGYNKLIF

SEQ ID NO: 179 - protein, 14 aa, Homo sapiens
  CDR3 alpha of TCR that specifically recognizes antigen associated with pathogenesis of autoimmune, allergic, or inflammatory condition
CAYRSYNQGGKLIF

SEQ ID NO: 180 - protein, 14 aa, Homo sapiens
  CDR3 alpha of TCR that specifically recognizes antigen associated with pathogenesis of autoimmune, allergic, or inflammatory condition
CAYRSYNQGGKLIF

SEQ ID NO: 181 - protein, 14 aa, Homo sapiens
  CDR3 alpha of TCR that specifically recognizes antigen associated with pathogenesis of autoimmune, allergic, or inflammatory condition
CVVIPGAGSYQLTF

SEQ ID NO: 182 - protein, 12 aa, Homo sapiens
  CDR3 alpha of TCR that specifically recognizes antigen associated with pathogenesis of autoimmune, allergic, or inflammatory condition
CHHGGSQGNLIF

SEQ ID NO: 183 - protein, 20 aa, Homo sapiens
  CDR3 alpha of TCR that specifically recognizes antigen associated with pathogenesis of autoimmune, allergic, or inflammatory condition
CVVNKYPLFDSGGSNYKLTF

SEQ ID NO: 184 - protein, 14 aa, Homo sapiens
  CDR3 alpha of TCR that specifically recognizes antigen associated with pathogenesis of autoimmune, allergic, or inflammatory condition
CIVRVDSGTYKYIF

SEQ ID NO: 185 - protein, 14 aa, Homo sapiens
  CDR3 alpha of TCR that specifically recognizes antigen associated with pathogenesis of autoimmune, allergic, or inflammatory condition
CAVSAPDSWGKLQF

SEQ ID NO: 186 - protein, 15 aa, Homo sapiens
  CDR3 alpha of TCR that specifically recognizes antigen associated with pathogenesis of autoimmune, allergic, or inflammatory condition
CAVNRYGGATNKLIF

SEQ ID NO: 187 - protein, 16 aa, Homo sapiens
  CDR3 alpha of TCR that specifically recognizes antigen associated with pathogenesis of autoimmune, allergic, or inflammatory condition
CAVRAVLSGSARQLTF

SEQ ID NO: 188 - protein, 16 aa, Homo sapiens
  CDR3 alpha of TCR that specifically recognizes antigen associated with pathogenesis of autoimmune, allergic, or inflammatory condition
CAYRNRGTLAGTALIF

SEQ ID NO: 189 - protein, 13 aa, Homo sapiens
  CDR3 alpha of TCR that specifically recognizes antigen associated with pathogenesis of autoimmune, allergic, or inflammatory condition
CAVSSGSARQLTF

SEQ ID NO: 190 - protein, 14 aa, Homo sapiens
  CDR3 alpha of TCR that specifically recognizes antigen associated with pathogenesis of autoimmune, allergic, or inflammatory condition
CAVDGSGNTGKLIF

SEQ ID NO: 191 - protein, 13 aa, Homo sapiens
  CDR3 alpha of TCR that specifically recognizes antigen associated with pathogenesis of autoimmune, allergic, or inflammatory condition
CAVGKTGFQKLVF

SEQ ID NO: 192 - protein, 13 aa, Homo sapiens
  CDR3 alpha of TCR that specifically recognizes antigen associated with pathogenesis of autoimmune, allergic, or inflammatory condition
CALKAGGYQKVTF

SEQ ID NO: 193 - protein, 13 aa, Homo sapiens
  CDR3 alpha of TCR that specifically recognizes antigen associated with pathogenesis of autoimmune, allergic, or inflammatory condition
CALPSGGYQKVTF

SEQ ID NO: 194 - protein, 15 aa, Homo sapiens
  CDR3 alpha of TCR that specifically recognizes antigen associated with pathogenesis of autoimmune, allergic, or inflammatory condition
CAVIPFGGNAGKSTF

SEQ ID NO: 195 - protein, 16 aa, Homo sapiens
  CDR3 alpha of TCR that specifically recognizes antigen associated with pathogenesis of autoimmune, allergic, or inflammatory condition
CATAIISNFGNEKLTF

SEQ ID NO: 196 - protein, 16 aa, Homo sapiens
  CDR3 alpha of TCR that specifically recognizes antigen associated with pathogenesis of autoimmune, allergic, or inflammatory condition
CATAIISNFGNEKLTF

SEQ ID NO: 197 - protein, 14 aa, Homo sapiens
  CDR3 alpha of TCR that specifically recognizes antigen associated with pathogenesis of autoimmune, allergic, or inflammatory condition
CALISSGSARQLTF

SEQ ID NO: 198 - protein, 13 aa, Homo sapiens
  CDR3 alpha of TCR that specifically recognizes antigen associated with pathogenesis of autoimmune, allergic, or inflammatory condition
CAQRSGGYNKLIF

SEQ ID NO: 199 - protein, 18 aa, Homo sapiens
  CDR3 alpha of TCR that specifically recognizes antigen associated with pathogenesis of autoimmune, allergic, or inflammatory condition
CVVNIEADWDTGRRALTF

SEQ ID NO: 200 - protein, 16 aa, Homo sapiens
  CDR3 alpha of TCR that specifically recognizes antigen associated with pathogenesis of autoimmune, allergic, or inflammatory condition
CAMREAYNTNAGKSTF

SEQ ID NO: 201 - protein, 16 aa, Homo sapiens
  CDR3 alpha of TCR that specifically recognizes antigen associated with pathogenesis of autoimmune, allergic, or inflammatory condition
CAMREAYNTNAGKSTF

SEQ ID NO: 202 - protein, 15 aa, Homo sapiens
  CDR3 alpha of TCR that specifically recognizes antigen associated with pathogenesis of autoimmune, allergic, or inflammatory condition
CAVRGIIQGAQKLVF

SEQ ID NO: 203 - protein, 10 aa, Homo sapiens
  CDR3 alpha of TCR that specifically recognizes antigen associated with pathogenesis of autoimmune, allergic, or inflammatory condition
CAVNVNQFYF

SEQ ID NO: 204 - protein, 12 aa, Homo sapiens
  CDR3 alpha of TCR that specifically recognizes antigen associated with pathogenesis of autoimmune, allergic, or inflammatory condition
CAVRPNDYKLSF

SEQ ID NO: 205 - protein, 14 aa, Homo sapiens
  CDR3 alpha of TCR that specifically recognizes antigen associated with pathogenesis of autoimmune, allergic, or inflammatory condition
CLVVDGGATNKLIF

SEQ ID NO: 206 - protein, 14 aa, Homo sapiens
  CDR3 alpha of TCR that specifically recognizes antigen associated with pathogenesis of autoimmune, allergic, or inflammatory condition
CALSDLRGFQKLVF

SEQ ID NO: 207 - protein, 12 aa, Homo sapiens
  CDR3 alpha of TCR that specifically recognizes antigen associated with pathogenesis of autoimmune, allergic, or inflammatory condition
CAVNQAGTALIF

SEQ ID NO: 208 - protein, 11 aa, Homo sapiens
  CDR3 alpha of TCR that specifically recognizes antigen associated with pathogenesis of autoimmune, allergic, or inflammatory condition
CALRANARLMF

SEQ ID NO: 209 - protein, 12 aa, Homo sapiens
  CDR3 alpha of TCR that specifically recognizes antigen associated with pathogenesis of autoimmune, allergic, or inflammatory condition
CAVNLAGTALIF

SEQ ID NO: 210 - protein, 13 aa, Homo sapiens
  CDR3 alpha of TCR that specifically recognizes antigen associated with pathogenesis of autoimmune, allergic, or inflammatory condition
CAARRYNFNKFYF

SEQ ID NO: 211 - protein, 16 aa, Homo sapiens
  CDR3 alpha of TCR that specifically recognizes antigen associated with pathogenesis of autoimmune, allergic, or inflammatory condition
CALSGALNNAGNMLTF

SEQ ID NO: 212 - protein, 16 aa, Homo sapiens
  CDR3 alpha of TCR that specifically recognizes antigen associated with pathogenesis of autoimmune, allergic, or inflammatory condition
CALSGALNNAGNMLTF

SEQ ID NO: 213 - protein, 14 aa, Homo sapiens
  CDR3 alpha of TCR that specifically recognizes antigen associated with pathogenesis of autoimmune, allergic, or inflammatory condition
CAMSPWGLNNDMRF

SEQ ID NO: 214 - protein, 15 aa, Homo sapiens
  CDR3 alpha of TCR that specifically recognizes antigen associated with pathogenesis of autoimmune, allergic, or inflammatory condition
CAVQAKNSGTYKYIF

SEQ ID NO: 215 - protein, 12 aa, Homo sapiens
  CDR3 alpha of TCR that specifically recognizes antigen associated with pathogenesis of autoimmune, allergic, or inflammatory condition
CASRSNDYKLSF

SEQ ID NO: 216 - protein, 12 aa, Homo sapiens
  CDR3 alpha of TCR that specifically recognizes antigen associated with pathogenesis of autoimmune, allergic, or inflammatory condition
CAIWNQGGKLIF

SEQ ID NO: 217 - protein, 14 aa, Homo sapiens
  CDR3 alpha of TCR that specifically recognizes antigen associated with pathogenesis of autoimmune, allergic, or inflammatory condition
CAVNSNQAGTALIF

SEQ ID NO: 218 - protein, 12 aa, Homo sapiens
  CDR3 alpha of TCR that specifically recognizes antigen associated with pathogenesis of autoimmune, allergic, or inflammatory condition
CAARKSAGKSTF

SEQ ID NO: 219 - protein, 14 aa, Homo sapiens
  CDR3 alpha of TCR that specifically recognizes antigen associated with pathogenesis of autoimmune, allergic, or inflammatory condition
CALVTTDSWGKLQF

SEQ ID NO: 220 - protein, 15 aa, Homo sapiens
  CDR3 alpha of TCR that specifically recognizes antigen associated with pathogenesis of autoimmune, allergic, or inflammatory condition
CATALYSGGYQKVTF

SEQ ID NO: 221 - protein, 15 aa, Homo sapiens
  CDR3 alpha of TCR that specifically recognizes antigen associated with pathogenesis of autoimmune, allergic, or inflammatory condition
CVVNTYSGGYQKVTF

SEQ ID NO: 222 - protein, 14 aa, Homo sapiens
  CDR3 alpha of TCR that specifically recognizes antigen associated with pathogenesis of autoimmune, allergic, or inflammatory condition
CAVRETGATNKLIF

SEQ ID NO: 223 - protein, 12 aa, Homo sapiens
  CDR3 alpha of TCR that specifically recognizes antigen associated with pathogenesis of autoimmune, allergic, or inflammatory condition
CAGPRGNEKLTF

SEQ ID NO: 224 - protein, 14 aa, Homo sapiens
  CDR3 alpha of TCR that specifically recognizes antigen associated with pathogenesis of autoimmune, allergic, or inflammatory condition
CAVGAWNNNARLMF

SEQ ID NO: 225 - protein, 15 aa, Homo sapiens
  CDR3 alpha of TCR that specifically recognizes antigen associated with pathogenesis of autoimmune, allergic, or inflammatory condition
CAETQSTSGTYKYIF

SEQ ID NO: 226 - protein, 15 aa, Homo sapiens
  CDR3 alpha of TCR that specifically recognizes antigen associated with pathogenesis of autoimmune, allergic, or inflammatory condition
CAATFPPGSARQLTF

SEQ ID NO: 227 - protein, 12 aa, Homo sapiens
  CDR3 alpha of TCR that specifically recognizes antigen associated with pathogenesis of autoimmune, allergic, or inflammatory condition
CAVGESNYQLIW

SEQ ID NO: 228 - protein, 15 aa, Homo sapiens
  CDR3 alpha of TCR that specifically recognizes antigen associated with pathogenesis of autoimmune, allergic, or inflammatory condition
CVVSDRGSTLGRLYF

SEQ ID NO: 229 - protein, 15 aa, Homo sapiens
  CDR3 alpha of TCR that specifically recognizes antigen associated with pathogenesis of autoimmune, allergic, or inflammatory condition
CVVSDRGSTLGRLYF

SEQ ID NO: 230 - protein, 15 aa, Homo sapiens
  CDR3 alpha of TCR that specifically recognizes antigen associated with pathogenesis of autoimmune, allergic, or inflammatory condition
CVVSDRGSTLGRLYF

SEQ ID NO: 231 - protein, 15 aa, Homo sapiens
  CDR3 alpha of TCR that specifically recognizes antigen associated with pathogenesis of autoimmune, allergic, or inflammatory condition
CVVSDRGSTLGRLYF

SEQ ID NO: 232 - protein, 15 aa, Homo sapiens
  CDR3 alpha of TCR that specifically recognizes antigen associated with pathogenesis of autoimmune, allergic, or inflammatory condition
CVVNRYSGGYQKVTF

SEQ ID NO: 233 - protein, 14 aa, Homo sapiens
  CDR3 alpha of TCR that specifically recognizes antigen associated with pathogenesis of autoimmune, allergic, or inflammatory condition
CAVTLNTNAGKSTF

SEQ ID NO: 234 - protein, 15 aa, Homo sapiens
  CDR3 beta of TCR that specifically recognizes antigen associated with pathogenesis of autoimmune, allergic, or inflammatory condition
CSARDLRETNEKLFF

SEQ ID NO: 235 - protein, 14 aa, Homo sapiens
  CDR3 beta of TCR that specifically recognizes antigen associated with pathogenesis of autoimmune, allergic, or inflammatory condition
CSARDGPTNEKLFF

SEQ ID NO: 236 - protein, 14 aa, Homo sapiens
  CDR3 beta of TCR that specifically recognizes antigen associated with pathogenesis of autoimmune, allergic, or inflammatory condition
CASRLRRSTDTQYF

SEQ ID NO: 237 - protein, 14 aa, Homo sapiens
  CDR3 beta of TCR that specifically recognizes antigen associated with pathogenesis of autoimmune, allergic, or inflammatory condition
CASSMGGALEKLFF

SEQ ID NO: 238 - protein, 15 aa, Homo sapiens
  CDR3 beta of TCR that specifically recognizes antigen associated with pathogenesis of autoimmune, allergic, or inflammatory condition
CASSLRANPGYEQYF

SEQ ID NO: 239 - protein, 15 aa, Homo sapiens
  CDR3 beta of TCR that specifically recognizes antigen associated with pathogenesis of autoimmune, allergic, or inflammatory condition
CASSLARGTLYEQYF

SEQ ID NO: 240 - protein, 14 aa, Homo sapiens
  CDR3 beta of TCR that specifically recognizes antigen associated with pathogenesis of autoimmune, allergic, or inflammatory condition
CAISAETLNEKLFF

SEQ ID NO: 241 - protein, 14 aa, Homo sapiens
  CDR3 beta of TCR that specifically recognizes antigen associated with pathogenesis of autoimmune, allergic, or inflammatory condition
CASSPQQVLGEAFF

SEQ ID NO: 242 - protein, 14 aa, Homo sapiens
  CDR3 beta of TCR that specifically recognizes antigen associated with pathogenesis of autoimmune, allergic, or inflammatory condition
CAIREDRNNYGYTF

SEQ ID NO: 243 - protein, 15 aa, Homo sapiens
  CDR3 beta of TCR that specifically recognizes antigen associated with pathogenesis of autoimmune, allergic, or inflammatory condition
CASSPRGGSYNEQFF

SEQ ID NO: 244 - protein, 15 aa, Homo sapiens
  CDR3 beta of TCR that specifically recognizes antigen associated with pathogenesis of autoimmune, allergic, or inflammatory condition
CASSRGRGSYNEQFF

SEQ ID NO: 245 - protein, 16 aa, Homo sapiens
  CDR3 beta of TCR that specifically recognizes antigen associated with pathogenesis of autoimmune, allergic, or inflammatory condition
CASSKGTGVSTDTQYF

SEQ ID NO: 246 - protein, 12 aa, Homo sapiens
  CDR3 beta of TCR that specifically recognizes antigen associated with pathogenesis of autoimmune, allergic, or inflammatory condition
CASSRTNEKLFF

SEQ ID NO: 247 - protein, 15 aa, Homo sapiens
  CDR3 beta of TCR that specifically recognizes antigen associated with pathogenesis of autoimmune, allergic, or inflammatory condition
CASSLARGTLYEQYF

SEQ ID NO: 248 - protein, 13 aa, Homo sapiens
  CDR3 beta of TCR that specifically recognizes antigen associated with pathogenesis of autoimmune, allergic, or inflammatory condition
CASSEEQGAIAFF

SEQ ID NO: 249 - protein, 14 aa, Homo sapiens
  CDR3 beta of TCR that specifically recognizes antigen associated with pathogenesis of autoimmune, allergic, or inflammatory condition
CASSLTSGLKKQYF

SEQ ID NO: 250 - protein, 14 aa, Homo sapiens
  CDR3 beta of TCR that specifically recognizes antigen associated with pathogenesis of autoimmune, allergic, or inflammatory condition
CASSESGGLGGYTF

SEQ ID NO: 251 - protein, 11 aa, Homo sapiens
  CDR3 beta of TCR that specifically recognizes antigen associated with pathogenesis of autoimmune, allergic, or inflammatory condition
CASSAGNTIYF

SEQ ID NO: 252 - protein, 12 aa, Homo sapiens
  CDR3 beta of TCR that specifically recognizes antigen associated with pathogenesis of autoimmune, allergic, or inflammatory condition
CASLKATDTQYF

SEQ ID NO: 253 - protein, 15 aa, Homo sapiens
  CDR3 beta of TCR that specifically recognizes antigen associated with pathogenesis of autoimmune, allergic, or inflammatory condition
CASSRGGGNTGELFF

SEQ ID NO: 254 - protein, 13 aa, Homo sapiens
  CDR3 beta of TCR that specifically recognizes antigen associated with pathogenesis of autoimmune, allergic, or inflammatory condition
CASGDRGADTQYF

SEQ ID NO: 255 - protein, 16 aa, Homo sapiens
  CDR3 beta of TCR that specifically recognizes antigen associated with pathogenesis of autoimmune, allergic, or inflammatory condition
CASRDLQGGRNYGYTF

SEQ ID NO: 256 - protein, 16 aa, Homo sapiens
  CDR3 beta of TCR that specifically recognizes antigen associated with pathogenesis of autoimmune, allergic, or inflammatory condition
CASRDLQGGRNYGYTF

SEQ ID NO: 257 - protein, 11 aa, Homo sapiens
  CDR3 beta of TCR that specifically recognizes antigen associated with pathogenesis of autoimmune, allergic, or inflammatory condition
CASSAGSEAFF

SEQ ID NO: 258 - protein, 15 aa, Homo sapiens
  CDR3 beta of TCR that specifically recognizes antigen associated with pathogenesis of autoimmune, allergic, or inflammatory condition
CASSFDSSGANVLTF

SEQ ID NO: 259 - protein, 15 aa, Homo sapiens
  CDR3 beta of TCR that specifically recognizes antigen associated with pathogenesis of autoimmune, allergic, or inflammatory condition
CASSLANSGANVLTF

SEQ ID NO: 260 - protein, 14 aa, Homo sapiens
  CDR3 beta of TCR that specifically recognizes antigen associated with pathogenesis of autoimmune, allergic, or inflammatory condition
CASSLLGRSNEQFF

SEQ ID NO: 261 - protein, 14 aa, Homo sapiens
  CDR3 beta of TCR that specifically recognizes antigen associated with pathogenesis of autoimmune, allergic, or inflammatory condition
CASSLLQTNYGYTF

SEQ ID NO: 262 - protein, 18 aa, Homo sapiens
  CDR3 beta of TCR that specifically recognizes antigen associated with pathogenesis of autoimmune, allergic, or inflammatory condition
CASSLSAIRDRGTDTQYF

SEQ ID NO: 263 - protein, 18 aa, Homo sapiens
CASSLTAGLASTYNEQFF

SEQ ID NO: 264 - protein, 15 aa, Homo sapiens
  CDR3 beta of TCR that specifically recognizes antigen associated with pathogenesis of autoimmune, allergic, or inflammatory condition
CASSPDRGRTGELFF

SEQ ID NO: 265 - protein, 15 aa, Homo sapiens
  CDR3 beta of TCR that specifically recognizes antigen associated with pathogenesis of autoimmune, allergic, or inflammatory condition
CASSPPAQGNSPLHF

SEQ ID NO: 266 - protein, 13 aa, Homo sapiens
  CDR3 beta of TCR that specifically recognizes antigen associated with pathogenesis of autoimmune, allergic, or inflammatory condition
CASSPRGQEGYTF

SEQ ID NO: 267 - protein, 14 aa, Homo sapiens
  CDR3 beta of TCR that specifically recognizes antigen associated with pathogenesis of autoimmune, allergic, or inflammatory condition
CASSPRTRHYEQFF

SEQ ID NO: 268 - protein, 15 aa, Homo sapiens
  CDR3 beta of TCR that specifically recognizes antigen associated with pathogenesis of autoimmune, allergic, or inflammatory condition
CASSPTGNSNQPQHF

SEQ ID NO: 269 - protein, 15 aa, Homo sapiens
  CDR3 beta of TCR that specifically recognizes antigen associated with pathogenesis of autoimmune, allergic, or inflammatory condition
CASSQDLAGVREQYF

SEQ ID NO: 270 - protein, 18 aa, Homo sapiens
  CDR3 beta of TCR that specifically recognizes antigen associated with pathogenesis of autoimmune, allergic, or inflammatory condition
CASSQDWTGTSLGNEQFF

SEQ ID NO: 271 - protein, 12 aa, Homo sapiens
  CDR3 beta of TCR that specifically recognizes antigen associated with pathogenesis of autoimmune, allergic, or inflammatory condition
CASSQGKTEAFF

SEQ ID NO: 272 - protein, 15 aa, Homo sapiens
  CDR3 beta of TCR that specifically recognizes antigen associated with pathogenesis of autoimmune, allergic, or inflammatory condition
CASSQHQRTGGEQYF

SEQ ID NO: 273 - protein, 16 aa, Homo sapiens
  CDR3 beta of TCR that specifically recognizes antigen associated with pathogenesis of autoimmune, allergic, or inflammatory condition
CASSQVGQGTNEKLFF

SEQ ID NO: 274 - protein, 15 aa, Homo sapiens
  CDR3 beta of TCR that specifically recognizes antigen associated with pathogenesis of autoimmune, allergic, or inflammatory condition
CAASPLSGSARQLTF

SEQ ID NO: 275 - protein, 17 aa, Homo sapiens
  CDR3 beta of TCR that specifically recognizes antigen associated with pathogenesis of autoimmune, allergic, or inflammatory condition
CASSRTTGADPGNTIYF

SEQ ID NO: 276 - protein, 13 aa, Homo sapiens
  CDR3 beta of TCR that specifically recognizes antigen associated with pathogenesis of autoimmune, allergic, or inflammatory condition
CASSSVGSYEQYF

SEQ ID NO: 277 - protein, 14 aa, Homo sapiens
  CDR3 beta of TCR that specifically recognizes antigen associated with pathogenesis of autoimmune, allergic, or inflammatory condition
CASSVGSSNQPQHF

SEQ ID NO: 278 - protein, 14 aa, Homo sapiens
  CDR3 beta of TCR that specifically recognizes antigen associated with pathogenesis of autoimmune, allergic, or inflammatory condition
CASSVGSSNQPQHF

SEQ ID NO: 279 - protein, 17 aa, Homo sapiens
  CDR3 beta of TCR that specifically recognizes antigen associated with pathogenesis of autoimmune, allergic, or inflammatory condition
CALGELPIKAAGNKLTF

SEQ ID NO: 280 - protein, 19 aa, Homo sapiens
  CDR3 beta of TCR that specifically recognizes antigen associated with pathogenesis of autoimmune, allergic, or inflammatory condition
CASSWLEEDSLSGGYGYTF

SEQ ID NO: 281 - protein, 15 aa, Homo sapiens
  CDR3 beta of TCR that specifically recognizes antigen associated with pathogenesis of autoimmune, allergic, or inflammatory condition
CASTLLGSGANVLTF

SEQ ID NO: 282 - protein, 17 aa, Homo sapiens
  CDR3 beta of TCR that specifically recognizes antigen associated with pathogenesis of autoimmune, allergic, or inflammatory condition
CSARATGGAGGTDTQYF

SEQ ID NO: 283 - protein, 15 aa, Homo sapiens
  CDR3 beta of TCR that specifically recognizes antigen associated with pathogenesis of autoimmune, allergic, or inflammatory condition
CASSGVMGLNQPQHF

SEQ ID NO: 284 - protein, 15 aa, Homo sapiens
  CDR3 beta of TCR that specifically recognizes antigen associated with pathogenesis of autoimmune, allergic, or inflammatory condition
CASSVEGQGRYEQFF

SEQ ID NO: 285 - protein, 16 aa, Homo sapiens
  CDR3 beta of TCR that specifically recognizes antigen associated with pathogenesis of autoimmune, allergic, or inflammatory condition
CASSDETGGTYNEQFF

SEQ ID NO: 286 - protein, 15 aa, Homo sapiens
  CDR3 beta of TCR that specifically recognizes antigen associated with pathogenesis of autoimmune, allergic, or inflammatory condition
CSVFDWDRGPGELFF

SEQ ID NO: 287 - protein, 15 aa, Homo sapiens
  CDR3 beta of TCR that specifically recognizes antigen associated with pathogenesis of autoimmune, allergic, or inflammatory condition
CASSMTSGQAYEQYF

SEQ ID NO: 288 - protein, 16 aa, Homo sapiens
  CDR3 beta of TCR that specifically recognizes antigen associated with pathogenesis of autoimmune, allergic, or inflammatory condition
CSAIRTSGTQPYEQYF

SEQ ID NO: 289 - protein, 15 aa, Homo sapiens
  CDR3 beta of TCR that specifically recognizes antigen associated with pathogenesis of autoimmune, allergic, or inflammatory condition
CSVDEDSGNDDTQYF

SEQ ID NO: 290 - protein, 16 aa, Homo sapiens
  CDR3 beta of TCR that specifically recognizes antigen associated with pathogenesis of autoimmune, allergic, or inflammatory condition
CATDAYRRFGNEKLTF

SEQ ID NO: 291 - protein, 15 aa, Homo sapiens
  CDR3 beta of TCR that specifically recognizes antigen associated with pathogenesis of autoimmune, allergic, or inflammatory condition
CASSLFGYRQETQYF

SEQ ID NO: 292 - protein, 15 aa, Homo sapiens
  CDR3 beta of TCR that specifically recognizes antigen associated with pathogenesis of autoimmune, allergic, or inflammatory condition
CASSLGGSSNQPQHF

SEQ ID NO: 293 - protein, 15 aa, Homo sapiens
  CDR3 beta of TCR that specifically recognizes antigen associated with pathogenesis of autoimmune, allergic, or inflammatory condition
CASSPLMGGPGEQYF

SEQ ID NO: 294 - protein, 12 aa, Homo sapiens
  CDR3 beta of TCR that specifically recognizes antigen associated with pathogenesis of autoimmune, allergic, or inflammatory condition
CASSQDYNEQFF

SEQ ID NO: 295 - protein, 17 aa, Homo sapiens
  CDR3 beta of TCR that specifically recognizes antigen associated with pathogenesis of autoimmune, allergic, or inflammatory condition
CASSYLLAGSMNTEAFF

SEQ ID NO: 296 - protein, 15 aa, Homo sapiens
  CDR3 beta of TCR that specifically recognizes antigen associated with pathogenesis of autoimmune, allergic, or inflammatory condition
CASSPRTSGSDEQFF

SEQ ID NO: 297 - protein, 15 aa, Homo sapiens
  CDR3 beta of TCR that specifically recognizes antigen associated with pathogenesis of autoimmune, allergic, or inflammatory condition
CASSQDTGLWTEAFF

SEQ ID NO: 298 - protein, 15 aa, Homo sapiens
  CDR3 beta of TCR that specifically recognizes antigen associated with pathogenesis of autoimmune, allergic, or inflammatory condition
CSARAEGGPYNEQFF

SEQ ID NO: 299 - protein, 15 aa, Homo sapiens
  CDR3 beta of TCR that specifically recognizes antigen associated with pathogenesis of autoimmune, allergic, or inflammatory condition
CASSWTGGATDTQYF

SEQ ID NO: 300 - protein, 14 aa, Homo sapiens
  CDR3 beta of TCR that specifically recognizes antigen associated with pathogenesis of autoimmune, allergic, or inflammatory condition
CASSPRPLTYEQYF

SEQ ID NO: 301 - protein, 15 aa, Homo sapiens
  CDR3 beta of TCR that specifically recognizes antigen associated with pathogenesis of autoimmune, allergic, or inflammatory condition
CSARPQGFSSYEQYF

SEQ ID NO: 302 - protein, 15 aa, Homo sapiens
  CDR3 beta of TCR that specifically recognizes antigen associated with pathogenesis of autoimmune, allergic, or inflammatory condition
CASSLNNPSYNEQFF

SEQ ID NO: 303 - protein, 14 aa, Homo sapiens
  CDR3 beta of TCR that specifically recognizes antigen associated with pathogenesis of autoimmune, allergic, or inflammatory condition
CASSYGTVNSPLHF

SEQ ID NO: 304 - protein, 15 aa, Homo sapiens
  CDR3 beta of TCR that specifically recognizes antigen associated with pathogenesis of autoimmune, allergic, or inflammatory condition
CASSLPGGAGNEQFF

SEQ ID NO: 305 - protein, 18 aa, Homo sapiens
  CDR3 beta of TCR that specifically recognizes antigen associated with pathogenesis of autoimmune, allergic, or inflammatory condition
CASSQDFCSDVMNTEAFF

SEQ ID NO: 306 - protein, 14 aa, Homo sapiens
  CDR3 beta of TCR that specifically recognizes antigen associated with pathogenesis of autoimmune, allergic, or inflammatory condition
CASRDRGGGEKLFF

SEQ ID NO: 307 - protein, 18 aa, Homo sapiens
  CDR3 beta of TCR that specifically recognizes antigen associated with pathogenesis of autoimmune, allergic, or inflammatory condition
CASSDPPGLAGSLNEQFF

SEQ ID NO: 308 - protein, 17 aa, Homo sapiens
  CDR3 beta of TCR that specifically recognizes antigen associated with pathogenesis of autoimmune, allergic, or inflammatory condition
CASSDPPSSGGRETQYF

SEQ ID NO: 309 - protein, 17 aa, Homo sapiens
  CDR3 beta of TCR that specifically recognizes antigen associated with pathogenesis of autoimmune, allergic, or inflammatory condition
CASSLREGLEATDTQYF

SEQ ID NO: 310 - protein, 14 aa, Homo sapiens
  CDR3 beta of TCR that specifically recognizes antigen associated with pathogenesis of autoimmune, allergic, or inflammatory condition
CASSPGHRDDGYTF

SEQ ID NO: 311 - protein, 15 aa, Homo sapiens
  CDR3 beta of TCR that specifically recognizes antigen associated with pathogenesis of autoimmune, allergic, or inflammatory condition
CASSMTSGVSETQYF

SEQ ID NO: 312 - protein, 14 aa, Homo sapiens
  CDR3 beta of TCR that specifically recognizes antigen associated with pathogenesis of autoimmune, allergic, or inflammatory condition
CASSPIINTGELFF

SEQ ID NO: 313 - protein, 12 aa, Homo sapiens
  CDR3 alpha of TCR that specifically recognizes antigen associated with pathogenesis of autoimmune, allergic, or inflammatory condition
CAVAGSARQLTF

SEQ ID NO: 314 - protein, 15 aa, Homo sapiens
  CDR3 alpha of TCR that specifically recognizes antigen associated with pathogenesis of autoimmune, allergic, or inflammatory condition
CVVIPAGAGSYQLTF

SEQ ID NO: 315 - protein, 12 aa, Homo sapiens
  CDR3 alpha of TCR that specifically recognizes antigen associated with pathogenesis of autoimmune, allergic, or inflammatory condition
CALSPNDYKLSF

SEQ ID NO: 316 - protein, 12 aa, Homo sapiens
  CDR3 alpha of TCR that specifically recognizes antigen associated with pathogenesis of autoimmune, allergic, or inflammatory condition
CALSPNDYKLSF

SEQ ID NO: 317 - protein, 12 aa, Homo sapiens
  CDR3 alpha of TCR that specifically recognizes antigen associated with pathogenesis of autoimmune, allergic, or inflammatory condition
CVVNKGNTPLVF

SEQ ID NO: 318 - protein, 13 aa, Homo sapiens
  CDR3 alpha of TCR that specifically recognizes antigen associated with pathogenesis of autoimmune, allergic, or inflammatory condition
CAVIASGNTPLVF

SEQ ID NO: 319 - protein, 15 aa, Homo sapiens
  CDR3 alpha of TCR that specifically recognizes antigen associated with pathogenesis of autoimmune, allergic, or inflammatory condition
CAGAESGANAGKSTF

SEQ ID NO: 320 - protein, 13 aa, Homo sapiens
  CDR3 alpha of TCR that specifically recognizes antigen associated with pathogenesis of autoimmune, allergic, or inflammatory condition
CAILSGGYNKLIF

SEQ ID NO: 321 - protein, 18 aa, Homo sapiens
  CDR3 alpha of TCR that specifically recognizes antigen associated with pathogenesis of autoimmune, allergic, or inflammatory condition
CAMRDPFDRGSTLGRLYF

SEQ ID NO: 322 - protein, 18 aa, Homo sapiens
  CDR3 alpha of TCR that specifically recognizes antigen associated with pathogenesis of autoimmune, allergic, or inflammatory condition
CAMRDPFDRGSTLGRLYF

SEQ ID NO: 323 - protein, 14 aa, Homo sapiens
  CDR3 alpha of TCR that specifically recognizes antigen associated with pathogenesis of autoimmune, allergic, or inflammatory condition
CALDIPEAGNMLTF

SEQ ID NO: 324 - protein, 15 aa, Homo sapiens
  CDR3 alpha of TCR that specifically recognizes antigen associated with pathogenesis of autoimmune, allergic, or inflammatory condition
CAVRDKGNQGGKLIF

SEQ ID NO: 325 - protein, 15 aa, Homo sapiens
  CDR3 alpha of TCR that specifically recognizes antigen associated with pathogenesis of autoimmune, allergic, or inflammatory condition
CAYRSGETSGSRLTF

SEQ ID NO: 326 - protein, 13 aa, Homo sapiens
  CDR3 alpha of TCR that specifically recognizes antigen associated with pathogenesis of autoimmune, allergic, or inflammatory condition
CAATGGGADGLTF

SEQ ID NO: 327 - protein, 11 aa, Homo sapiens
  CDR3 alpha of TCR that specifically recognizes antigen associated with pathogenesis of autoimmune, allergic, or inflammatory condition
CAAKSSYKLIF

SEQ ID NO: 328 - protein, 16 aa, Homo sapiens
  CDR3 alpha of TCR that specifically recognizes antigen associated with pathogenesis of autoimmune, allergic, or inflammatory condition
CAVGRYSGAGSYQLTF

SEQ ID NO: 329 - protein, 14 aa, Homo sapiens
  CDR3 alpha of TCR that specifically recognizes antigen associated with pathogenesis of autoimmune, allergic, or inflammatory condition
CALSISGGSYIPTF

SEQ ID NO: 330 - protein, 15 aa, Homo sapiens
  CDR3 alpha of TCR that specifically recognizes antigen associated with pathogenesis of autoimmune, allergic, or inflammatory condition
CAMKTQGQAGTALIF

SEQ ID NO: 331 - protein, 12 aa, Homo sapiens
  CDR3 alpha of TCR that specifically recognizes antigen associated with pathogenesis of autoimmune, allergic, or inflammatory condition
CAMRGNTDKLIF

SEQ ID NO: 332 - protein, 16 aa, Homo sapiens
  CDR3 alpha of TCR that specifically recognizes antigen associated with pathogenesis of autoimmune, allergic, or inflammatory condition
CALSDRSGAGSYQLTF

SEQ ID NO: 333 - protein, 13 aa, Homo sapiens
  CDR3 alpha of TCR that specifically recognizes antigen associated with pathogenesis of autoimmune, allergic, or inflammatory condition
CAASLTHGQNFVF

SEQ ID NO: 334 - protein, 13 aa, Homo sapiens
  CDR3 alpha of TCR that specifically recognizes antigen associated with pathogenesis of autoimmune, allergic, or inflammatory condition
CAGGVYGNNRLAF

SEQ ID NO: 335 - protein, 13 aa, Homo sapiens
  CDR3 alpha of TCR that specifically recognizes antigen associated with pathogenesis of autoimmune, allergic, or inflammatory condition
CAASRAGFQKLVF

SEQ ID NO: 336 - protein, 14 aa, Homo sapiens
  CDR3 alpha of TCR that specifically recognizes antigen associated with pathogenesis of autoimmune, allergic, or inflammatory condition
CVVNSRNQGGKLIF

SEQ ID NO: 337 - protein, 13 aa, Homo sapiens
  CDR3 alpha of TCR that specifically recognizes antigen associated with pathogenesis of autoimmune, allergic, or inflammatory condition
CAWRTGANSKLTF

SEQ ID NO: 338 - protein, 16 aa, Homo sapiens
  CDR3 alpha of TCR that specifically recognizes antigen associated with pathogenesis of autoimmune, allergic, or inflammatory condition
CLVGAPISGGYNKLIF

SEQ ID NO: 339 - protein, 16 aa, Homo sapiens
  CDR3 alpha of TCR that specifically recognizes antigen associated with pathogenesis of autoimmune, allergic, or inflammatory condition
CLVGAPISGGYNKLIF

SEQ ID NO: 340 - protein, 12 aa, Homo sapiens
  CDR3 alpha of TCR that specifically recognizes antigen associated with pathogenesis of autoimmune, allergic, or inflammatory condition
CAPRVGSYIPTF

SEQ ID NO: 341 - protein, 13 aa, Homo sapiens
  CDR3 alpha of TCR that specifically recognizes antigen associated with pathogenesis of autoimmune, allergic, or inflammatory condition
CAVRDSGNTPLVF

SEQ ID NO: 342 - protein, 15 aa, Homo sapiens
  CDR3 alpha of TCR that specifically recognizes antigen associated with pathogenesis of autoimmune, allergic, or inflammatory condition
CALSASWTAGNKLTF

SEQ ID NO: 343 - protein, 12 aa, Homo sapiens
  CDR3 alpha of TCR that specifically recognizes antigen associated with pathogenesis of autoimmune, allergic, or inflammatory condition
CAVRFPGNQFYF

SEQ ID NO: 344 - protein, 12 aa, Homo sapiens
  CDR3 alpha of TCR that specifically recognizes antigen associated with pathogenesis of autoimmune, allergic, or inflammatory condition
CAVRHNGNQFYF

SEQ ID NO: 345 - protein, 15 aa, Homo sapiens
  CDR3 alpha of TCR that specifically recognizes antigen associated with pathogenesis of autoimmune, allergic, or inflammatory condition
CAVRDSMDSSYKLIF

SEQ ID NO: 346 - protein, 14 aa, Homo sapiens
  CDR3 alpha of TCR that specifically recognizes antigen associated with pathogenesis of autoimmune, allergic, or inflammatory condition
CAVRDNTGFQKLVF

SEQ ID NO: 347 - protein, 16 aa, Homo sapiens
  CDR3 alpha of TCR that specifically recognizes antigen associated with pathogenesis of autoimmune, allergic, or inflammatory condition
CALSEARTDTGNQFYF

SEQ ID NO: 348 - protein, 13 aa, Homo sapiens
  CDR3 alpha of TCR that specifically recognizes antigen associated with pathogenesis of autoimmune, allergic, or inflammatory condition
CAASMKYGNKLVF

SEQ ID NO: 349 - protein, 13 aa, Homo sapiens
  CDR3 alpha of TCR that specifically recognizes antigen associated with pathogenesis of autoimmune, allergic, or inflammatory condition
CAASMKYGNKLVF

SEQ ID NO: 350 - protein, 15 aa, Homo sapiens
  CDR3 alpha of TCR that specifically recognizes antigen associated with pathogenesis of autoimmune, allergic, or inflammatory condition
CALSEARSNDYKLSF

SEQ ID NO: 351 - protein, 15 aa, Homo sapiens
  CDR3 alpha of TCR that specifically recognizes antigen associated with pathogenesis of autoimmune, allergic, or inflammatory condition
CALSEARSNDYKLSF

SEQ ID NO: 352 - protein, 16 aa, Homo sapiens
  CDR3 alpha of TCR that specifically recognizes antigen associated with pathogenesis of autoimmune, allergic, or inflammatory condition
CALSEARTDTGNQFYF

SEQ ID NO: 353 - protein, 15 aa, Homo sapiens
  CDR3 alpha of TCR that specifically recognizes antigen associated with pathogenesis of autoimmune, allergic, or inflammatory condition
CAVNAGGTSYGKLTF

SEQ ID NO: 354 - protein, 11 aa, Homo sapiens
  CDR3 alpha of TCR that specifically recognizes antigen associated with pathogenesis of autoimmune, allergic, or inflammatory condition
CAASIIARLMF

SEQ ID NO: 355 - protein, 13 aa, Homo sapiens
  CDR3 alpha of TCR that specifically recognizes antigen associated with pathogenesis of autoimmune, allergic, or inflammatory condition
CAGTASGTYKYIF

SEQ ID NO: 356 - protein, 14 aa, Homo sapiens
  CDR3 alpha of TCR that specifically recognizes antigen associated with pathogenesis of autoimmune, allergic, or inflammatory condition
CAVRMNTGFQKLVF

SEQ ID NO: 357 - protein, 16 aa, Homo sapiens
  CDR3 alpha of TCR that specifically recognizes antigen associated with pathogenesis of autoimmune, allergic, or inflammatory condition
CALSEARGSDGQKLLF

SEQ ID NO: 358 - protein, 13 aa, Homo sapiens
  CDR3 alpha of TCR that specifically recognizes antigen associated with pathogenesis of autoimmune, allergic, or inflammatory condition
CAMRLHNNNDMRF

SEQ ID NO: 359 - protein, 16 aa, Homo sapiens
  CDR3 alpha of TCR that specifically recognizes antigen associated with pathogenesis of autoimmune, allergic, or inflammatory condition
CAMSNAGGTSYGKLTF

SEQ ID NO: 360 - protein, 11 aa, Homo sapiens
  CDR3 alpha of TCR that specifically recognizes antigen associated with pathogenesis of autoimmune, allergic, or inflammatory condition
CAVSGNTPLVF

SEQ ID NO: 361 - protein, 12 aa, Homo sapiens
  CDR3 alpha of TCR that specifically recognizes antigen associated with pathogenesis of autoimmune, allergic, or inflammatory condition
CAYRSPARQLTF

SEQ ID NO: 362 - protein, 16 aa, Homo sapiens
  CDR3 alpha of TCR that specifically recognizes antigen associated with pathogenesis of autoimmune, allergic, or inflammatory condition
CAMSALGNFGNEKLTF

SEQ ID NO: 363 - protein, 14 aa, Homo sapiens
  CDR3 alpha of TCR that specifically recognizes antigen associated with pathogenesis of autoimmune, allergic, or inflammatory condition
CAVSFTSGTYKYIF

SEQ ID NO: 364 - protein, 14 aa, Homo sapiens
  CDR3 alpha of TCR that specifically recognizes antigen associated with pathogenesis of autoimmune, allergic, or inflammatory condition
CAVSFTSGTYKYIF

SEQ ID NO: 365 - protein, 13 aa, Homo sapiens
  CDR3 alpha of TCR that specifically recognizes antigen associated with pathogenesis of autoimmune, allergic, or inflammatory condition
CAVSGGSQGNLIF

SEQ ID NO: 366 - protein, 16 aa, Homo sapiens
  CDR3 alpha of TCR that specifically recognizes antigen associated with pathogenesis of autoimmune, allergic, or inflammatory condition
CGTEQNSGGSNYKLTF

SEQ ID NO: 367 - protein, 14 aa, Homo sapiens
  CDR3 alpha of TCR that specifically recognizes antigen associated with pathogenesis of autoimmune, allergic, or inflammatory condition
CALRGNTGGFKTIF

SEQ ID NO: 368 - protein, 12 aa, Homo sapiens
  CDR3 alpha of TCR that specifically recognizes antigen associated with pathogenesis of autoimmune, allergic, or inflammatory condition
CAVSDNNARLMF

SEQ ID NO: 369 - protein, 15 aa, Homo sapiens
  CDR3 alpha of TCR that specifically recognizes antigen associated with pathogenesis of autoimmune, allergic, or inflammatory condition
CAVSDQGSGYSTLTF

SEQ ID NO: 370 - protein, 14 aa, Homo sapiens
  CDR3 alpha of TCR that specifically recognizes antigen associated with pathogenesis of autoimmune, allergic, or inflammatory condition
CAWDPLDSNYQLIW

SEQ ID NO: 371 - protein, 15 aa, Homo sapiens
  CDR3 alpha of TCR that specifically recognizes antigen associated with pathogenesis of autoimmune, allergic, or inflammatory condition
CAMRERESGNTPLVF

SEQ ID NO: 372 - protein, 12 aa, Homo sapiens
  CDR3 alpha of TCR that specifically recognizes antigen associated with pathogenesis of autoimmune, allergic, or inflammatory condition
CAVENAGNMLTF

SEQ ID NO: 373 - protein, 12 aa, Homo sapiens
  CDR3 alpha of TCR that specifically recognizes antigen associated with pathogenesis of autoimmune, allergic, or inflammatory condition
CGENNAGNMLTF

SEQ ID NO: 374 - protein, 15 aa, Homo sapiens
  CDR3 alpha of TCR that specifically recognizes antigen associated with pathogenesis of autoimmune, allergic, or inflammatory condition
CVLPGVGTSYGKLTF

SEQ ID NO: 375 - protein, 14 aa, Homo sapiens
  CDR3 alpha of TCR that specifically recognizes antigen associated with pathogenesis of autoimmune, allergic, or inflammatory condition
CAVNIRYNTDKLIF

SEQ ID NO: 376 - protein, 14 aa, Homo sapiens
  CDR3 alpha of TCR that specifically recognizes antigen associated with pathogenesis of autoimmune, allergic, or inflammatory condition
CAVNIRYNTDKLIF

SEQ ID NO: 377 - protein, 13 aa, Homo sapiens
  CDR3 alpha of TCR that specifically recognizes antigen associated with pathogenesis of autoimmune, allergic, or inflammatory condition
CAVVADSNYQLIW

SEQ ID NO: 378 - protein, 12 aa, Homo sapiens
  CDR3 alpha of TCR that specifically recognizes antigen associated with pathogenesis of autoimmune, allergic, or inflammatory condition
CAAASNDYKLSF

SEQ ID NO: 379 - protein, 14 aa, Homo sapiens
  CDR3 alpha of TCR that specifically recognizes antigen associated with pathogenesis of autoimmune, allergic, or inflammatory condition
CAFKRETSGSRLTF

SEQ ID NO: 380 - protein, 13 aa, Homo sapiens
  CDR3 alpha of TCR that specifically recognizes antigen associated with pathogenesis of autoimmune, allergic, or inflammatory condition
CAATPGGADGLTF

SEQ ID NO: 381 - protein, 12 aa, Homo sapiens
  CDR3 alpha of TCR that specifically recognizes antigen associated with pathogenesis of autoimmune, allergic, or inflammatory condition
CAVSNSGYALNF

SEQ ID NO: 382 - protein, 11 aa, Homo sapiens
  CDR3 alpha of TCR that specifically recognizes antigen associated with pathogenesis of autoimmune, allergic, or inflammatory condition
CAASYGNKLVF

SEQ ID NO: 383 - protein, 12 aa, Homo sapiens
  CDR3 alpha of TCR that specifically recognizes antigen associated with pathogenesis of autoimmune, allergic, or inflammatory condition
CAASQYDYKLSF

SEQ ID NO: 384 - protein, 15 aa, Homo sapiens
  CDR3 alpha of TCR that specifically recognizes antigen associated with pathogenesis of autoimmune, allergic, or inflammatory condition
CALSASSGSARQLTF

SEQ ID NO: 385 - protein, 12 aa, Homo sapiens
  CDR3 alpha of TCR that specifically recognizes antigen associated with pathogenesis of autoimmune, allergic, or inflammatory condition
CAANNQGGKLIF

SEQ ID NO: 386 - protein, 13 aa, Homo sapiens
  CDR3 alpha of TCR that specifically recognizes antigen associated with pathogenesis of autoimmune, allergic, or inflammatory condition
CAASTGGGNKLTF

SEQ ID NO: 387 - protein, 13 aa, Homo sapiens
  CDR3 alpha of TCR that specifically recognizes antigen associated with pathogenesis of autoimmune, allergic, or inflammatory condition
FFAGGTSYGKLTF

SEQ ID NO: 388 - protein, 13 aa, Homo sapiens
  CDR3 alpha of TCR that specifically recognizes antigen associated with pathogenesis of autoimmune, allergic, or inflammatory condition
CAASKTYGQNFVF

SEQ ID NO: 389 - protein, 11 aa, Homo sapiens
  CDR3 alpha of TCR that specifically recognizes antigen associated with pathogenesis of autoimmune, allergic, or inflammatory condition
CAATNFNKFYF

SEQ ID NO: 390 - protein, 13 aa, Homo sapiens
  CDR3 alpha of TCR that specifically recognizes antigen associated with pathogenesis of autoimmune, allergic, or inflammatory condition
CAASIGGYQKVTF

SEQ ID NO: 391 - protein, 15 aa, Homo sapiens
  CDR3 alpha of TCR that specifically recognizes antigen associated with pathogenesis of autoimmune, allergic, or inflammatory condition
CAASTRGSTLGRLYF

SEQ ID NO: 392 - protein, 13 aa, Homo sapiens
  CDR3 alpha of TCR that specifically recognizes antigen associated with pathogenesis of autoimmune, allergic, or inflammatory condition
CALGKGSARQLTF

SEQ ID NO: 393 - protein, 13 aa, Homo sapiens
  CDR3 alpha of TCR that specifically recognizes antigen associated with pathogenesis of autoimmune, allergic, or inflammatory condition
CAAKGGGADGLTF

SEQ ID NO: 394 - protein, 15 aa, Homo sapiens
  CDR3 alpha of TCR that specifically recognizes antigen associated with pathogenesis of autoimmune, allergic, or inflammatory condition
CAASTRRGTGNQFYF

SEQ ID NO: 395 - protein, 15 aa, Homo sapiens
  CDR3 alpha of TCR that specifically recognizes antigen associated with pathogenesis of autoimmune, allergic, or inflammatory condition
CAASGGSSNTGKLIF

SEQ ID NO: 396 - protein, 16 aa, Homo sapiens
  CDR3 alpha of TCR that specifically recognizes antigen associated with pathogenesis of autoimmune, allergic, or inflammatory condition
CAASGNYGGSQGNLIF

SEQ ID NO: 397 - protein, 16 aa, Homo sapiens
  CDR3 alpha of TCR that specifically recognizes antigen associated with pathogenesis of autoimmune, allergic, or inflammatory condition
CAASGNYGGSQGNLIF

SEQ ID NO: 398 - protein, 14 aa, Homo sapiens
  CDR3 alpha of TCR that specifically recognizes antigen associated with pathogenesis of autoimmune, allergic, or inflammatory condition
CAETRNSGNTPLVF

SEQ ID NO: 399 - protein, 14 aa, Homo sapiens
  CDR3 alpha of TCR that specifically recognizes antigen associated with pathogenesis of autoimmune, allergic, or inflammatory condition
CALHSGAGSYQLTF

SEQ ID NO: 400 - protein, 16 aa, Homo sapiens
  CDR3 alpha of TCR that specifically recognizes antigen associated with pathogenesis of autoimmune, allergic, or inflammatory condition
CALSEVSAGANSKLTF

SEQ ID NO: 401 - protein, 12 aa, Homo sapiens
  CDR3 alpha of TCR that specifically recognizes antigen associated with pathogenesis of autoimmune, allergic, or inflammatory condition
CAVGEYGNKLVF

SEQ ID NO: 402 - protein, 13 aa, Homo sapiens
CAALNNAGNMLTF

SEQ ID NO: 403 - protein, 14 aa, Homo sapiens
  CDR3 alpha of TCR that specifically recognizes antigen associated with pathogenesis of autoimmune, allergic, or inflammatory condition
CAVDVETSGSRLTF

SEQ ID NO: 404 - protein, 16 aa, Homo sapiens
  CDR3 alpha of TCR that specifically recognizes antigen associated with pathogenesis of autoimmune, allergic, or inflammatory condition
CALSEATQGGSEKLVF

SEQ ID NO: 405 - protein, 16 aa, Homo sapiens
  CDR3 beta of TCR that specifically recognizes antigen associated with pathogenesis of autoimmune, allergic, or inflammatory condition
CASSPRDGSSYNEQFF

SEQ ID NO: 406 - protein, 16 aa, Homo sapiens
  CDR3 beta of TCR that specifically recognizes antigen associated with pathogenesis of autoimmune, allergic, or inflammatory condition
CASSPRDGSSYNEQFF

SEQ ID NO: 407 - protein, 14 aa, Homo sapiens
  CDR3 beta of TCR that specifically recognizes antigen associated with pathogenesis of autoimmune, allergic, or inflammatory condition
CAVSTTSGTYKYIF

SEQ ID NO: 408 - protein, 13 aa, Homo sapiens
  CDR3 beta of TCR that specifically recognizes antigen associated with pathogenesis of autoimmune, allergic, or inflammatory condition
CSARGPTAHGYTF

SEQ ID NO: 409 - protein, 14 aa, Homo sapiens
  CDR3 beta of TCR that specifically recognizes antigen associated with pathogenesis of autoimmune, allergic, or inflammatory condition
CAISDSLGATEAFF

SEQ ID NO: 410 - protein, 17 aa, Homo sapiens
  CDR3 beta of TCR that specifically recognizes antigen associated with pathogenesis of autoimmune, allergic, or inflammatory condition
CASKGPGTVIRADTQYF

SEQ ID NO: 411 - protein, 14 aa, Homo sapiens
  CDR3 beta of TCR that specifically recognizes antigen associated with pathogenesis of autoimmune, allergic, or inflammatory condition
CASKRASMNTEAFF

SEQ ID NO: 412 - protein, 10 aa, Homo sapiens
  CDR3 beta of TCR that specifically recognizes antigen associated with pathogenesis of autoimmune, allergic, or inflammatory condition
CASSAETQYF

SEQ ID NO: 413 - protein, 13 aa, Homo sapiens
  CDR3 beta of TCR that specifically recognizes antigen associated with pathogenesis of autoimmune, allergic, or inflammatory condition
CVVEVSGNTPLVF

SEQ ID NO: 414 - protein, 11 aa, Homo sapiens
  CDR3 beta of TCR that specifically recognizes antigen associated with pathogenesis of autoimmune, allergic, or inflammatory condition
CASSFESRAFF

SEQ ID NO: 415 - protein, 14 aa, Homo sapiens
  CDR3 beta of TCR that specifically recognizes antigen associated with pathogenesis of autoimmune, allergic, or inflammatory condition
CASSLLAGDNEQFF

SEQ ID NO: 416 - protein, 14 aa, Homo sapiens
  CDR3 beta of TCR that specifically recognizes antigen associated with pathogenesis of autoimmune, allergic, or inflammatory condition
CASSLNRMAYEQYF

SEQ ID NO: 417 - protein, 17 aa, Homo sapiens
  CDR3 beta of TCR that specifically recognizes antigen associated with pathogenesis of autoimmune, allergic, or inflammatory condition
CASSLVASGAVQETQYF

SEQ ID NO: 418 - protein, 20 aa, Homo sapiens
  CDR3 beta of TCR that specifically recognizes antigen associated with pathogenesis of autoimmune, allergic, or inflammatory condition
CASSTTRGQGVRRNTGELFF

SEQ ID NO: 419 - protein, 15 aa, Homo sapiens
  CDR3 beta of TCR that specifically recognizes antigen associated with pathogenesis of autoimmune, allergic, or inflammatory condition
CASSAPLNRDAEAFF

SEQ ID NO: 420 - protein, 14 aa, Homo sapiens
  CDR3 beta of TCR that specifically recognizes antigen associated with pathogenesis of autoimmune, allergic, or inflammatory condition
CASSDGTGPYGYTF

SEQ ID NO: 421 - protein, 15 aa, Homo sapiens
  CDR3 beta of TCR that specifically recognizes antigen associated with pathogenesis of autoimmune, allergic, or inflammatory condition
CASSFRQGEQETQYF

SEQ ID NO: 422 - protein, 13 aa, Homo sapiens
  CDR3 beta of TCR that specifically recognizes antigen associated with pathogenesis of autoimmune, allergic, or inflammatory condition
CASSISNTGELFF

SEQ ID NO: 423 - protein, 16 aa, Homo sapiens
  CDR3 beta of TCR that specifically recognizes antigen associated with pathogenesis of autoimmune, allergic, or inflammatory condition
CASSLHRARSGNTIYF

SEQ ID NO: 424 - protein, 20 aa, Homo sapiens
  CDR3 beta of TCR that specifically recognizes antigen associated with pathogenesis of autoimmune, allergic, or inflammatory condition
CASSPPAGDRLTSGANVLTF

SEQ ID NO: 425 - protein, 13 aa, Homo sapiens
  CDR3 beta of TCR that specifically recognizes antigen associated with pathogenesis of autoimmune, allergic, or inflammatory condition
CASSPPGLGEQYF

SEQ ID NO: 426 - protein, 13 aa, Homo sapiens
  CDR3 beta of TCR that specifically recognizes antigen associated with pathogenesis of autoimmune, allergic, or inflammatory condition
CASSPPGLGEQYF

SEQ ID NO: 427 - protein, 15 aa, Homo sapiens
  CDR3 beta of TCR that specifically recognizes antigen associated with pathogenesis of autoimmune, allergic, or inflammatory condition
CASSPPPGGNSPLHF

SEQ ID NO: 428 - protein, 17 aa, Homo sapiens
  CDR3 beta of TCR that specifically recognizes antigen associated with pathogenesis of autoimmune, allergic, or inflammatory condition
CASSYSYPGQGNEKLFF

SEQ ID NO: 429 - protein, 14 aa, Homo sapiens
  CDR3 beta of TCR that specifically recognizes antigen associated with pathogenesis of autoimmune, allergic, or inflammatory condition
CATGLAANTGELFF

SEQ ID NO: 430 - protein, 11 aa, Homo sapiens
  CDR3 beta of TCR that specifically recognizes antigen associated with pathogenesis of autoimmune, allergic, or inflammatory condition
CAVTGGFKTIF

SEQ ID NO: 431 - protein, 17 aa, Homo sapiens
  CDR3 beta of TCR that specifically recognizes antigen associated with pathogenesis of autoimmune, allergic, or inflammatory condition
CATSDLQMGASRETQYF

SEQ ID NO: 432 - protein, 15 aa, Homo sapiens
  CDR3 beta of TCR that specifically recognizes antigen associated with pathogenesis of autoimmune, allergic, or inflammatory condition
CAWRLTGGSGNTIYF

SEQ ID NO: 433 - protein, 15 aa, Homo sapiens
  CDR3 beta of TCR that specifically recognizes antigen associated with pathogenesis of autoimmune, allergic, or inflammatory condition
CAWRLTGGSGNTIYF

SEQ ID NO: 434 - protein, 16 aa, Homo sapiens
  CDR3 beta of TCR that specifically recognizes antigen associated with pathogenesis of autoimmune, allergic, or inflammatory condition
CSARATASGAYNEQFF

SEQ ID NO: 435 - protein, 13 aa, Homo sapiens
  CDR3 beta of TCR that specifically recognizes antigen associated with pathogenesis of autoimmune, allergic, or inflammatory condition
CSVNRGGTDTQYF

SEQ ID NO: 436 - protein, 13 aa, Homo sapiens
  CDR3 beta of TCR that specifically recognizes antigen associated with pathogenesis of autoimmune, allergic, or inflammatory condition
CSVNRGGTDTQYF

SEQ ID NO: 437 - protein, 13 aa, Homo sapiens
  CDR3 beta of TCR that specifically recognizes antigen associated with pathogenesis of autoimmune, allergic, or inflammatory condition
CASRASLPDTQYF

SEQ ID NO: 438 - protein, 16 aa, Homo sapiens
  CDR3 beta of TCR that specifically recognizes antigen associated with pathogenesis of autoimmune, allergic, or inflammatory condition
CASSTKGQGASETQYF

SEQ ID NO: 439 - protein, 11 aa, Homo sapiens
  CDR3 beta of TCR that specifically recognizes antigen associated with pathogenesis of autoimmune, allergic, or inflammatory condition
CASSEGYGYTF

SEQ ID NO: 440 - protein, 16 aa, Homo sapiens
  CDR3 beta of TCR that specifically recognizes antigen associated with pathogenesis of autoimmune, allergic, or inflammatory condition
CAGPQDPMDSNYQLIW

SEQ ID NO: 441 - protein, 15 aa, Homo sapiens
  CDR3 beta of TCR that specifically recognizes antigen associated with pathogenesis of autoimmune, allergic, or inflammatory condition
CASSLVVRVDNEQFF

SEQ ID NO: 442 - protein, 17 aa, Homo sapiens
  CDR3 beta of TCR that specifically recognizes antigen associated with pathogenesis of autoimmune, allergic, or inflammatory condition
CAVQAGSKGNAGNMLTF

SEQ ID NO: 443 - protein, 14 aa, Homo sapiens
  CDR3 beta of TCR that specifically recognizes antigen associated with pathogenesis of autoimmune, allergic, or inflammatory condition
CASSQVAGVYEQFF

SEQ ID NO: 444 - protein, 18 aa, Homo sapiens
  CDR3 beta of TCR that specifically recognizes antigen associated with pathogenesis of autoimmune, allergic, or inflammatory condition
CAISESDRRRDPNYGYTF

SEQ ID NO: 445 - protein, 14 aa, Homo sapiens
  CDR3 beta of TCR that specifically recognizes antigen associated with pathogenesis of autoimmune, allergic, or inflammatory condition
CASSRTGLTTEAFF

SEQ ID NO: 446 - protein, 13 aa, Homo sapiens
  CDR3 beta of TCR that specifically recognizes antigen associated with pathogenesis of autoimmune, allergic, or inflammatory condition
CASSPEGRETQYF

SEQ ID NO: 447 - protein, 17 aa, Homo sapiens
  CDR3 beta of TCR that specifically recognizes antigen associated with pathogenesis of autoimmune, allergic, or inflammatory condition
CATSRDRLQGARNEQFF

SEQ ID NO: 448 - protein, 18 aa, Homo sapiens
  CDR3 beta of TCR that specifically recognizes antigen associated with pathogenesis of autoimmune, allergic, or inflammatory condition
CASSVGMDPGLGYNEQFF

SEQ ID NO: 449 - protein, 13 aa, Homo sapiens
  CDR3 beta of TCR that specifically recognizes antigen associated with pathogenesis of autoimmune, allergic, or inflammatory condition
CASSHTDGYEQYF

SEQ ID NO: 450 - protein, 14 aa, Homo sapiens
  CDR3 beta of TCR that specifically recognizes antigen associated with pathogenesis of autoimmune, allergic, or inflammatory condition
CASIASRYNQPQHF

SEQ ID NO: 451 - protein, 14 aa, Homo sapiens
  CDR3 beta of TCR that specifically recognizes antigen associated with pathogenesis of autoimmune, allergic, or inflammatory condition
CASSLARYNEKLFF

SEQ ID NO: 452 - protein, 17 aa, Homo sapiens
  CDR3 beta of TCR that specifically recognizes antigen associated with pathogenesis of autoimmune, allergic, or inflammatory condition
CASSLGLLGSSYNEQFF

SEQ ID NO: 453 - protein, 16 aa, Homo sapiens
  CDR3 beta of TCR that specifically recognizes antigen associated with pathogenesis of autoimmune, allergic, or inflammatory condition
CASSEGWGVPSYEQYF

SEQ ID NO: 454 - protein, 13 aa, Homo sapiens
  CDR3 beta of TCR that specifically recognizes antigen associated with pathogenesis of autoimmune, allergic, or inflammatory condition
CASSIAGGNEQFF

SEQ ID NO: 455 - protein, 17 aa, Homo sapiens
  CDR3 beta of TCR that specifically recognizes antigen associated with pathogenesis of autoimmune, allergic, or inflammatory condition
CASSHSTSGRAGNEQFF

SEQ ID NO: 456 - protein, 17 aa, Homo sapiens
  CDR3 beta of TCR that specifically recognizes antigen associated with pathogenesis of autoimmune, allergic, or inflammatory condition
CASSQVGPSGGAKTQYF

SEQ ID NO: 457 - protein, 14 aa, Homo sapiens
  CDR3 beta of TCR that specifically recognizes antigen associated with pathogenesis of autoimmune, allergic, or inflammatory condition
CASSPPTGWGGYTF

SEQ ID NO: 458 - protein, 14 aa, Homo sapiens
  CDR3 beta of TCR that specifically recognizes antigen associated with pathogenesis of autoimmune, allergic, or inflammatory condition
CASSLFGQGSEQYF

SEQ ID NO: 459 - protein, 16 aa, Homo sapiens
  CDR3 beta of TCR that specifically recognizes antigen associated with pathogenesis of autoimmune, allergic, or inflammatory condition
CASSEAVAGLRNTIYF

SEQ ID NO: 460 - protein, 12 aa, Homo sapiens
  CDR3 beta of TCR that specifically recognizes antigen associated with pathogenesis of autoimmune, allergic, or inflammatory condition
CASSQGSYGYTF

SEQ ID NO: 461 - protein, 13 aa, Homo sapiens
  CDR3 beta of TCR that specifically recognizes antigen associated with pathogenesis of autoimmune, allergic, or inflammatory condition
CASSWTANQPQHF

SEQ ID NO: 462 - protein, 13 aa, Homo Sapiens
  CDR3 beta of TCR that specifically recognizes antigen associated with pathogenesis of autoimmune, allergic, or inflammatory condition
CSARRTSGNEQFF

SEQ ID NO: 463 - protein, 15 aa, Homo sapiens
  CDR3 beta of TCR that specifically recognizes antigen associated with pathogenesis of autoimmune, allergic, or inflammatory condition
CASSVVGIAADTQYF

SEQ ID NO: 464 - protein, 13 aa, Homo sapiens
  CDR3 beta of TCR that specifically recognizes antigen associated with pathogenesis of autoimmune, allergic, or inflammatory condition
CASWTVSYNEQFF

SEQ ID NO: 465 - protein, 17 aa, Homo sapiens
  CDR3 beta of TCR that specifically recognizes antigen associated with pathogenesis of autoimmune, allergic, or inflammatory condition
CASSLQPPGTSTETQYF

SEQ ID NO: 466 - protein, 17 aa, Homo sapiens
  CDR3 beta of TCR that specifically recognizes antigen associated with pathogenesis of autoimmune, allergic, or inflammatory condition
CASRGTGTSGPGDTQYF

SEQ ID NO: 467 - protein, 12 aa, Homo sapiens
  CDR3 beta of TCR that specifically recognizes antigen associated with pathogenesis of autoimmune, allergic, or inflammatory condition
CALSYGGFKTIF

SEQ ID NO: 468 - protein, 17 aa, Homo sapiens
  CDR3 beta of TCR that specifically recognizes antigen associated with pathogenesis of autoimmune, allergic, or inflammatory condition
CASSSIQGSGSGQPQHF

SEQ ID NO: 469 - protein, 11 aa, Homo sapiens
  CDR3 beta of TCR that specifically recognizes antigen associated with pathogenesis of autoimmune, allergic, or inflammatory condition
GGTGTASKLTF

SEQ ID NO: 470 - protein, 11 aa, Homo sapiens
  CDR3 beta of TCR that specifically recognizes antigen associated with pathogenesis of autoimmune, allergic, or inflammatory condition
CASSYSTGYTF

SEQ ID NO: 471 - protein, 14 aa, Homo sapiens
  CDR3 beta of TCR that specifically recognizes antigen associated with pathogenesis of autoimmune, allergic, or inflammatory condition
CASSTRLAGDEQFF

SEQ ID NO: 472 - protein, 15 aa, Homo sapiens
  CDR3 beta of TCR that specifically recognizes antigen associated with pathogenesis of autoimmune, allergic, or inflammatory condition
CASSVSGSTYNEQFF

SEQ ID NO: 473 - protein, 12 aa, Homo sapiens
  CDR3 beta of TCR that specifically recognizes antigen associated with pathogenesis of autoimmune, allergic, or inflammatory condition
CSVFHRGETQYF

SEQ ID NO: 474 - protein, 13 aa, Homo sapiens
  CDR3 beta of TCR that specifically recognizes antigen associated with pathogenesis of autoimmune, allergic, or inflammatory condition
CSATSGTMDTQYF

SEQ ID NO: 475 - protein, 12 aa, Homo sapiens
  CDR3 beta of TCR that specifically recognizes antigen associated with pathogenesis of autoimmune, allergic, or inflammatory condition
CASSSSTDTQYF

SEQ ID NO: 476 - protein, 12 aa, Homo sapiens
  CDR3 beta of TCR that specifically recognizes antigen associated with pathogenesis of autoimmune, allergic, or inflammatory condition
CASSRSSYEQYF

SEQ ID NO: 477 - protein, 14 aa, Homo sapiens
  CDR3 beta of TCR that specifically recognizes antigen associated with pathogenesis of autoimmune, allergic, or inflammatory condition
CSAREGTSDDEQYF

SEQ ID NO: 478 - protein, 14 aa, Homo sapiens
  CDR3 beta of TCR that specifically recognizes antigen associated with pathogenesis of autoimmune, allergic, or inflammatory condition
CSVERGSLQETQYF

SEQ ID NO: 479 - protein, 14 aa, Homo sapiens
  CDR3 beta of TCR that specifically recognizes antigen associated with pathogenesis of autoimmune, allergic, or inflammatory condition
CASSSYRGTYEQYF

SEQ ID NO: 480 - protein, 15 aa, Homo sapiens
  CDR3 beta of TCR that specifically recognizes antigen associated with pathogenesis of autoimmune, allergic, or inflammatory condition
CASSLRQGGTDTQYF

SEQ ID NO: 481 - protein, 14 aa, Homo sapiens
  CDR3 beta of TCR that specifically recognizes antigen associated with pathogenesis of autoimmune, allergic, or inflammatory condition
CASSLEGASYEQYF

SEQ ID NO: 482 - protein, 12 aa, Homo sapiens
  CDR3 beta of TCR that specifically recognizes antigen associated with pathogenesis of autoimmune, allergic, or inflammatory condition
CASSVASNEQFF

SEQ ID NO: 483 - protein, 16 aa, Homo sapiens
  CDR3 beta of TCR that specifically recognizes antigen associated with pathogenesis of autoimmune, allergic, or inflammatory condition
CASSSSDRGGTDTQYF

SEQ ID NO: 484 - protein, 17 aa, Homo sapiens
  CDR3 beta of TCR that specifically recognizes antigen associated with pathogenesis of autoimmune, allergic, or inflammatory condition
CASSPRLAGEITDTQYF

SEQ ID NO: 485 - protein, 12 aa, Homo sapiens
  CDR3 beta of TCR that specifically recognizes antigen associated with pathogenesis of autoimmune, allergic, or inflammatory condition
CASSSGLAQQYF

SEQ ID NO: 486 - protein, 22 aa, Homo sapiens
  CDR3 beta of TCR that specifically recognizes antigen associated with pathogenesis of autoimmune, allergic, or inflammatory condition
CASSLWASGRDSSFSGANVLTF

SEQ ID NO: 487 - protein, 14 aa, Homo sapiens
  CDR3 beta of TCR that specifically recognizes antigen associated with pathogenesis of autoimmune, allergic, or inflammatory condition
CASSPGADDNEQFF

SEQ ID NO: 488 - protein, 22 aa, Homo sapiens
  CDR3 beta of TCR that specifically recognizes antigen associated with pathogenesis of autoimmune, allergic, or inflammatory condition
CASSLKFESRERGQGSGETQYF

SEQ ID NO: 489 - protein, 18 aa, Homo sapiens
  CDR3 beta of TCR that specifically recognizes antigen associated with pathogenesis of autoimmune, allergic, or inflammatory condition
CASSLGLASGTLYNEQFF

SEQ ID NO: 490 - protein, 13 aa, Homo sapiens
CAGGRFGANVLTF

SEQ ID NO: 491 - protein, 14 aa, Homo sapiens
  CDR3 beta of TCR that specifically recognizes antigen associated with pathogenesis of autoimmune, allergic, or inflammatory condition
CASSIGASTDTQYF

SEQ ID NO: 492 - protein, 13 aa, Homo sapiens
  CDR3 beta of TCR that specifically recognizes antigen associated with pathogenesis of autoimmune, allergic, or inflammatory condition
CASSPLGNQPQHF

SEQ ID NO: 493 - protein, 15 aa, Homo sapiens
  CDR3 beta of TCR that specifically recognizes antigen associated with pathogenesis of autoimmune, allergic, or inflammatory condition
CASSLSRGGANIQYF

SEQ ID NO: 494 - protein, 14 aa, Homo sapiens
  CDR3 beta of TCR that specifically recognizes antigen associated with pathogenesis of autoimmune, allergic, or inflammatory condition
CACSESLAGGKQFF

SEQ ID NO: 495 - protein, 16 aa, Homo sapiens
  CDR3 beta of TCR that specifically recognizes antigen associated with pathogenesis of autoimmune, allergic, or inflammatory condition
CSARALAGARNNEQFF

SEQ ID NO: 496 - protein, 15 aa, Homo sapiens
  CDR3 beta of TCR that specifically recognizes antigen associated with pathogenesis of autoimmune, allergic, or inflammatory condition
CASSLLAGVGKTQYF

SEQ ID NO: 497 - protein, 14 aa, Homo sapiens
  CDR3 alpha of TCR that specifically recognizes antigen associated with pathogenesis of autoimmune, allergic, or inflammatory condition
CALSGGDSSYKLIF

SEQ ID NO: 498 - protein, 13 aa, Homo sapiens
  CDR3 alpha of TCR that specifically recognizes antigen associated with pathogenesis of autoimmune, allergic, or inflammatory condition
CAALIQGAQKLVF

SEQ ID NO: 499 - protein, 13 aa, Homo sapiens
  CDR3 alpha of TCR that specifically recognizes antigen associated with pathogenesis of autoimmune, allergic, or inflammatory condition
CAALIQGAQKLVF

SEQ ID NO: 500 - protein, 14 aa, Homo sapiens
  CDR3 alpha of TCR that specifically recognizes antigen associated with pathogenesis of autoimmune, allergic, or inflammatory condition
CAVDRGSTLGRLYF

SEQ ID NO: 501 - protein, 17 aa, Homo sapiens
  CDR3 alpha of TCR that specifically recognizes antigen associated with pathogenesis of autoimmune, allergic, or inflammatory condition
CAASVYAGGTSYGKLTF

SEQ ID NO: 502 - protein, 17 aa, Homo sapiens
  CDR3 alpha of TCR that specifically recognizes antigen associated with pathogenesis of autoimmune, allergic, or inflammatory condition
CAASSSAGGTSYGKLTF

SEQ ID NO: 503 - protein, 15 aa, Homo sapiens
  CDR3 beta of TCR that specifically recognizes antigen associated with pathogenesis of autoimmune, allergic, or inflammatory condition
CASSLADRVNTEAFF

SEQ ID NO: 504 - protein, 11 aa, Homo sapiens
  CDR3 beta of TCR that specifically recognizes antigen associated with pathogenesis of autoimmune, allergic, or inflammatory condition
CASTYHGTGYF

SEQ ID NO: 505 - protein, 11 aa, Homo sapiens
  CDR3 beta of TCR that specifically recognizes antigen associated with pathogenesis of autoimmune, allergic, or inflammatory condition
CASTYHGTGYF

SEQ ID NO: 506 - protein, 12 aa, Homo sapiens
  CDR3 beta of TCR that specifically recognizes antigen associated with pathogenesis of autoimmune, allergic, or inflammatory condition
CASSQIRETQYF

SEQ ID NO: 507 - protein, 13 aa, Homo sapiens
  CDR3 beta of TCR that specifically recognizes antigen associated with pathogenesis of autoimmune, allergic, or inflammatory condition
CASRPRRDNEQFF

SEQ ID NO: 508 - protein, 13 aa, Homo sapiens
  CDR3 beta of TCR that specifically recognizes antigen associated with pathogenesis of autoimmune, allergic, or inflammatory condition
CASRPRDPVTQYF

SEQ ID NO: 509 - protein, 16 aa, Homo sapiens
  junction sequence of TCR that specifically recognizes antigen associated with pathogenesis of autoimmune, allergic, or inflammatory condition
CASSFRGGGNPYEQYF

SEQ ID NO: 510 - protein, 16 aa, Homo sapiens
  junction sequence of TCR that specifically recognizes antigen associated with pathogenesis of autoimmune, allergic, or inflammatory condition
CAVGAGYGGATNKLIF

SEQ ID NO: 511 - protein, 16 aa, Homo sapiens
  junction sequence of TCR that specifically recognizes antigen associated with pathogenesis of autoimmune, allergic, or inflammatory condition
CASTLLWGGDSYEQYF

SEQ ID NO: 512 - protein, 13 aa, Homo sapiens
  junction sequence of TCR that specifically recognizes antigen associated with pathogenesis of autoimmune, allergic, or inflammatory condition
CAERLYGNNRLAF

SEQ ID NO: 513 - protein, 12 aa, Homo sapiens
  junction sequence of TCR that specifically recognizes antigen associated with pathogenesis of autoimmune, allergic, or inflammatory condition
CASSFTYNEQFF

SEQ ID NO: 514 - protein, 10 aa, Homo sapiens
  junction sequence of TCR that specifically recognizes antigen associated with pathogenesis of autoimmune, allergic, or inflammatory condition
CAAAGNQFYF

SEQ ID NO: 515 - protein, 12 aa, Homo sapiens
  junction sequence of TCR that specifically recognizes antigen associated with pathogenesis of autoimmune, allergic, or inflammatory condition
CAWSAQGETQYF

SEQ ID NO: 516 - protein, 14 aa, Homo sapiens
  junction sequence of TCR that specifically recognizes antigen associated with pathogenesis of autoimmune, allergic, or inflammatory condition
CAASGANSGYALNF

SEQ ID NO: 517 - protein, 16 aa, Homo sapiens
  junction sequence of TCR that specifically recognizes antigen associated with pathogenesis of autoimmune, allergic, or inflammatory condition
CASSLGTGTGVYEQYF

SEQ ID NO: 518 - protein, 16 aa, Homo sapiens
  junction sequence of TCR that specifically recognizes antigen associated with pathogenesis of autoimmune, allergic, or inflammatory condition
CAVRDMRGAGSYQLTF

SEQ ID NO: 519 - protein, 15 aa, Homo sapiens
  junction sequence of TCR that specifically recognizes antigen associated with pathogenesis of autoimmune, allergic, or inflammatory condition
CASSSQGQGKETQYF

SEQ ID NO: 520 - protein, 12 aa, Homo sapiens
  junction sequence of TCR that specifically recognizes antigen associated with pathogenesis of autoimmune, allergic, or inflammatory condition
CAENRSDYKLSF

SEQ ID NO: 521 - protein, 14 aa, Homo sapiens
  junction sequence of TCR that specifically recognizes antigen associated with pathogenesis of autoimmune, allergic, or inflammatory condition
CASKYNRGEQPQHF

SEQ ID NO: 522 - protein, 14 aa, Homo sapiens
  junction sequence of TCR that specifically recognizes antigen associated with pathogenesis of autoimmune, allergic, or inflammatory condition
CAVKLQGGSEKLVF

SEQ ID NO: 523 - protein, 13 aa, Homo sapiens
  junction sequence of TCR that specifically recognizes antigen associated with pathogenesis of autoimmune, allergic, or inflammatory condition
CASSLGVTGELFF

SEQ ID NO: 524 - protein, 14 aa, Homo sapiens
  junction sequence of TCR that specifically recognizes antigen associated with pathogenesis of autoimmune, allergic, or inflammatory condition
CAVQAGNAGNMLTF

SEQ ID NO: 525 - protein, 13 aa, Homo sapiens
  junction sequence of TCR that specifically recognizes antigen associated with pathogenesis of autoimmune, allergic, or inflammatory condition
CASSLAGTDTQYF

SEQ ID NO: 526 - protein, 15 aa, Homo sapiens
  junction sequence of TCR that specifically recognizes antigen associated with pathogenesis of autoimmune, allergic, or inflammatory condition
CAASIGGGGSYIPTF

SEQ ID NO: 527 - protein, 17 aa, Homo sapiens
  junction sequence of TCR that specifically recognizes antigen associated with pathogenesis of autoimmune, allergic, or inflammatory condition
CASSLVGGRVDWREQYF

SEQ ID NO: 528 - protein, 15 aa, Homo sapiens
  junction sequence of TCR that specifically recognizes antigen associated with pathogenesis of autoimmune, allergic, or inflammatory condition
CATDSSSGSARQLTF

SEQ ID NO: 529 - protein, 15 aa, Homo sapiens
  junction sequence of TCR that specifically recognizes antigen associated with pathogenesis of autoimmune, allergic, or inflammatory condition
CASSVNRGHNTEAFF

SEQ ID NO: 530 - protein, 14 aa, Homo sapiens
  junction sequence of TCR that specifically recognizes antigen associated with pathogenesis of autoimmune, allergic, or inflammatory condition
CAMEGGRYNTPLVF

SEQ ID NO: 531 - protein, 12 aa, Homo sapiens
  junction sequence of TCR that specifically recognizes antigen associated with pathogenesis of autoimmune, allergic, or inflammatory condition
CAWMGGYNEQFF

SEQ ID NO: 532 - protein, 14 aa, Homo sapiens
  junction sequence of TCR that specifically recognizes antigen associated with pathogenesis of autoimmune, allergic, or inflammatory condition
CAESTSGSARQLTF

SEQ ID NO: 533 - protein, 14 aa, Homo sapiens
  junction sequence of TCR that specifically recognizes antigen associated with pathogenesis of autoimmune, allergic, or inflammatory condition
CASSSQGANYGYTF

SEQ ID NO: 534 - protein, 11 aa, Homo sapiens
  junction sequence of TCR that specifically recognizes antigen associated with pathogenesis of autoimmune, allergic, or inflammatory condition
CAASEPDKLIF

SEQ ID NO: 535 - protein, 2 aa, Homo sapiens
  junction sequence of TCR that specifically recognizes antigen associated with pathogenesis of autoimmune, allergic, or inflammatory condition
NA

SEQ ID NO: 536 - protein, 2 aa, Homo sapiens
  junction sequence of TCR that specifically recognizes antigen associated with pathogenesis of autoimmune, allergic, or inflammatory condition
NA

SEQ ID NO: 537 - protein, 17 aa, Homo sapiens
  junction sequence of TCR that specifically recognizes antigen associated with pathogenesis of autoimmune, allergic, or inflammatory condition
CASSQEVGTVPNQPQHF

SEQ ID NO: 538 - protein, 12 aa, Homo sapiens
  junction sequence of TCR that specifically recognizes antigen associated with pathogenesis of autoimmune, allergic, or inflammatory condition
CAGQTGANNLFF

SEQ ID NO: 539 - protein, 14 aa, Homo sapiens
  junction sequence of TCR that specifically recognizes antigen associated with pathogenesis of autoimmune, allergic, or inflammatory condition
CASSFGSSYYGYTF

SEQ ID NO: 540 - protein, 16 aa, Homo sapiens
  junction sequence of TCR that specifically recognizes antigen associated with pathogenesis of autoimmune, allergic, or inflammatory condition
CILRDTISNFGNEKTF

SEQ ID NO: 541 - protein, 15 aa, Homo sapiens
  junction sequence of TCR that specifically recognizes antigen associated with pathogenesis of autoimmune, allergic, or inflammatory condition
CASSLALGQGNQQFF

SEQ ID NO: 542 - protein, 15 aa, Homo sapiens
  junction sequence of TCR that specifically recognizes antigen associated with pathogenesis of autoimmune, allergic, or inflammatory condition
CAVEDLNQAGTALIF

SEQ ID NO: 543 - protein, 20 aa, Homo sapiens
  junction sequence of TCR that specifically recognizes antigen associated with pathogenesis of autoimmune, allergic, or inflammatory condition
CASSEGVTAPGLAGPYEQYF

SEQ ID NO: 544 - protein, 15 aa, Homo sapiens
  junction sequence of TCR that specifically recognizes antigen associated with pathogenesis of autoimmune, allergic, or inflammatory condition
CVVSDRGSTLGRLYF

SEQ ID NO: 545 - protein, 12 aa, Homo sapiens
  junction sequence of TCR that specifically recognizes antigen associated with pathogenesis of autoimmune, allergic, or inflammatory condition
CSAKGQPRGAFF

SEQ ID NO: 546 - protein, 14 aa, Homo sapiens
  junction sequence of TCR that specifically recognizes antigen associated with pathogenesis of autoimmune, allergic, or inflammatory condition
CALSAEAGGFKTIF

SEQ ID NO: 547 - DNA, 343 bp, Homo sapiens
  TCR alpha and beta chain V region of TCR that specifically recognizes antigen associated with pathogenesis of autoimmune, allergic, or inflammatory condition
ggagctggagtctcccagtcccccagtaacaaggtcacagagaagggaaaggatgtagagctcaggtgtgatccaatttcaggtcatactgccctttactggtaccgacagagcctggggcagggcctggagtttttaatttacttccaaggcaacagtgcaccagacaaatcagggctgcccagtgatcgcttctctgcagagaggactgggggatccgtctccactctgacgatccagcgcacacagcaggaggactcggccgtgtatctctgtgccagcagcttagggcgacagggcgctggctacaccttcggttcggggaccaggttaaccgttgtag

SEQ ID NO: 548 - DNA, 346 bp, Homo sapiens
  TCR alpha and beta chain V region of TCR that specifically recognizes antigen associated with pathogenesis of autoimmune, allergic, or inflammatory condition
gctcagaaggtaactcaagcgcagactgaaatttctgtggtggagaaggaggatgtgaccttggactgtgtgtatgaaacccgtgatactacttattacttattctggtacaagcaaccaccaagtggagaattggttttccttattcgtcggaactcttttgatgagcaaaatgaaataagtggtcggtattcttggaacttccagaaatccaccagttccttcaacttcaccatcacagcctcacaagtcgtggactcagcagtatacttctgtgctctgagccggggtactggaggcttcaaaactatctttggagcaggaacaagactatttgttaaagcaa

SEQ ID NO: 549 - DNA, 340 bp, Homo sapiens
  TCR alpha and beta chain V region of TCR that specifically recognizes antigen associated with pathogenesis of autoimmune, allergic, or inflammatory condition
gaacctgaagtcacccagactcccagccatcaggtcacacagatgggacaggaagtgatcttgcgctgtgtccccatctctaatcacttatacttctattggtacagacaaatcttggggcagaaagtcgagtttctggtttccttttataataatgaaatctcagagaagtctgaaatattcgatgatcaattctcagttgaaaggcctgatggatcaaatttcactctgaagatccggtccacaaagctggaggactcagccatgtacttctgtgccagcagtggagtcggagcctacgagcagtacttcgggccgggcaccaggctcacggtcacag

SEQ ID NO: 550 - DNA, 343 bp, Homo sapiens
  TCR alpha and beta chain V region of TCR that specifically recognizes antigen associated with pathogenesis of autoimmune, allergic, or inflammatory condition
gctcagaaggtaactcaagcgcagactgaaatttctgtggtggagaaggaggatgtgaccttggactgtgtgtatgaaacccgtgatactacttattacttattctggtacaagcaaccaccaagtggagaattggttttccttattcgtcggaactcttttgatgagcaaaatgaaataagtggtcggtattcttggaacttccagaaatccaccagttccttcaacttcaccatcacagcctcacaagtcgtggactcagcagtatacttctgtgctctgagaggggatagcagctataaattgatcttcgggagtgggaccagactgctggtcaggcctg

SEQ ID NO: 551 - DNA, 352 bp, Homo sapiens
  TCR alpha and beta chain V region of TCR that specifically recognizes antigen associated with pathogenesis of autoimmune, allergic, or inflammatory condition
gatgctggagttatccagtcaccccggcacgaggtgacagagatgggacaagaagtgactctgagatgtaaaccaatttcaggacacgactaccttttctggtacagacagaccatgatgcggggactggagttgctcatttactttaacaacaacgttccgatagatgattcagggatgcccgaggatcgattctcagctaagatgcctaatgcatcattctccactctgaagatccagccctcagaacccagggactcagctgtgtacttctgtgccagcagttccctcaaagcgggagggggggacaatgagcagttcttcgggccagggacacggctcaccgtgctag

SEQ ID NO: 552 - DNA, 340 bp, Homo sapiens
  TCR alpha and beta chain V region of TCR that specifically recognizes antigen associated with pathogenesis of autoimmune, allergic, or inflammatory condition
gcccagtctgtgacccagcttgacagccaagtccctgtctttgaagaagcccctgtggagctgaggtgcaactactcatcgtctgtttcagtgtatctcttctggtatgtgcaataccccaaccaaggactccagcttctcctgaagtatttatcaggatccaccctggttaaaggcatcaacggttttgaggctgaatttaacaagagtcaaacttccttccacttgaggaaaccctcagtccatataagcgacacggctgagtacttctgtgctgtgagtgaaagaggcttcaacaaattttactttggatctgggaccaaactcaatgtaaaaccaa

SEQ ID NO: 553 - DNA, 352 bp, Homo sapiens
  TCR alpha and beta chain V region of TCR that specifically recognizes antigen associated with pathogenesis of autoimmune, allergic, or inflammatory condition
gatactggagtctcccaggaccccagacacaagatcacaaagaggggacagaatgtaactttcaggtgtgatccaatttctgaacacaaccgcctttattggtaccgacagaccctggggcagggcccagagtttctgacttacttccagaatgaagctcaactagaaaaatcaaggctgctcagtgatcggttctctgcagagaggcctaagggatctttctccaccttggagatccagcgcacagagcagggggactcggccatgtatctctgtgccagccccccgccaggaacaggagtattccaagagacccagtacttcgggccaggcacgcggctcctggtgctcg

SEQ ID NO: 554 - DNA, 340 bp, Homo sapiens
  TCR alpha and beta chain V region of TCR that specifically recognizes antigen associated with pathogenesis of autoimmune, allergic, or inflammatory condition
gctcagaaggtaactcaagcgcagactgaaatttctgtggtggagaaggaggatgtgaccttggactgtgtgtatgaaacccgtgatactacttattacttattctggtacaagcaaccaccaagtggagaattggttttccttattcgtcggaactcttttgatgagcaaaatgaaataagtggtcggtattcttggaacttccagaaatccaccagttccttcaacttcaccatcacagcctcacaagtcgtggactcagcagtatacttctgtgctctgaactatggaggcttcaaaactatctttggagcaggaacaagactatttgttaaagcaa

SEQ ID NO: 555 - DNA, 340 bp, Homo sapiens
  TCR alpha and beta chain V region of TCR that specifically recognizes antigen associated with pathogenesis of autoimmune, allergic, or inflammatory condition
gagactggagtcacccaaagtcccacacacctgatcaaaacgagaggacagcaagtgactctgagatgctcttctcagtctgggcacaacactgtgtcctggtaccaacaggccctgggtcaggggccccagtttatctttcagtattatagggaggaagagaatggcagaggaaacttccctcctagattctcaggtctccagttccctaattatagctctgagctgaatgtgaacgccttggagctggacgactcggccctgtatctctgtgccagcagctttaaacaggggaacggggagctgttttttggagaaggctctaggctgaccgtactgg

SEQ ID NO: 556 - DNA, 340 bp, Homo sapiens
  TCR alpha and beta chain V region of TCR that specifically recognizes antigen associated with pathogenesis of autoimmune, allergic, or inflammatory condition
gctcagtcagtggctcagccggaagatcaggtcaacgttgctgaagggaatcctctgactgtgaaatgcacctattcagtctctggaaacccttatcttttttggtatgttcaataccccaaccgaggcctccagttccttctgaaatacatcacaggggataacctggttaaaggcagctatggctttgaagctgaatttaacaagagccaaacctccttccacctgaagaaaccatctgcccttgtgagcgactccgctttgtacttctgtgctgtgagagacatggacggaggaaagcttatcttcggacagggaacggagttatctgtgaaaccca

SEQ ID NO: 557 - DNA, 343 bp, Homo sapiens
  TCR alpha and beta chain V region of TCR that specifically recognizes antigen associated with pathogenesis of autoimmune, allergic, or inflammatory condition
gaagctggagttgcccagtctcccagatataagattatagagaaaaggcagagtgtggctttttggtgcaatcctatatctggccatgctaccctttactggtaccagcagatcctgggacagggcccaaagcttctgattcagtttcagaataacggtgtagtggatgattcacagttgcctaaggatcgattttctgcagagaggctcaaaggagtagactccactctcaagatccaacctgcaaagcttgaggactcggccgtgtatctctgtgccagcagcttagatcccttcacagatacgcagtattttggcccaggcacccggctgacagtgctcg

SEQ ID NO: 558 - DNA, 352 bp, Homo sapiens
  TCR alpha and beta chain V region of TCR that specifically recognizes antigen associated with pathogenesis of autoimmune, allergic, or inflammatory condition
gctcagacagtcactcagtctcaaccagagatgtctgtgcaggaggcagagaccgtgaccctgagctgcacatatgacaccagtgagagtgattattatttattctggtacaagcagcctcccagcaggcagatgattctcgttattcgccaagaagcttataagcaacagaatgcaacagagaatcgtttctctgtgaacttccagaaagcagccaaatccttcagtctcaagatctcagactcacagctgggggatgccgcgatgtatttctgtgcttataggttgaattatggtggtgctacaaacaagctcatctttggaactggcactctgcttgctgtccagccaa

SEQ ID NO: 559 - DNA, 325 bp, Homo sapiens
  TCR alpha and beta chain V region of TCR that specifically recognizes antigen associated with pathogenesis of autoimmune, allergic, or inflammatory condition
aaggaccaagtgtttcagccttccacagtggcatcttcagagggagctgtggtggaaatcttctgtaatcactctgtgtccaatgcttacaacttcttctggtaccttcacttcccgggatgtgcaccaagactccttgttaaaggctcaaagccttctcagcagggacgatacaacatgacctatgaacggttctcttcatcgctgctcatcctccaggtgcgggaggcagatgctgctgtttactactgtgctgtggagttgggctctggcaacacaggcaaactaatctttgggcaagggacaactttacaagtaaaaccag

SEQ ID NO: 560 - DNA, 343 bp, Homo sapiens
  TCR alpha and beta chain V region of TCR that specifically recognizes antigen associated with pathogenesis of autoimmune, allergic, or inflammatory condition
gaagctggagtggttcagtctcccagatataagattatagagaaaaaacagcctgtggctttttggtgcaatcctatttctggccacaataccctttactggtacctgcagaacttgggacagggcccggagcttctgattcgatatgagaatgaggaagcagtagacgattcacagttgcctaaggatcgattttctgcagagaggctcaaaggagtagactccactctcaagatccagcctgcagagcttggggactcggccgtgtatctctgtgccagcagcgcccgacaaaacaccggggagctgttttttggagaaggctctaggctgaccgtactgg

SEQ ID NO: 561 - DNA, 343 bp, Homo sapiens
  TCR alpha and beta chain V region of TCR that specifically recognizes antigen associated with pathogenesis of autoimmune, allergic, or inflammatory condition
agtgctgtcatctctcaaaagccaagcagggatatctgtcaacgtggaacctccctgacgatccagtgtcaagtcgatagccaagtcaccatgatgttctggtaccgtcagcaacctggacagagcctgacactgatcgcaactgcaaatcagggctctgaggccacatatgagagtggatttgtcattgacaagtttcccatcagccgcccaaacctaacattctcaactctgactgtgagcaacatgagccctgaagacagcagcatatatctctgcagcgtggaccggcagggtggctacgagcagtacttcgggccgggcaccaggctcacggtcacag

SEQ ID NO: 562 - DNA, 352 bp, Homo sapiens
  TCR alpha and beta chain V region of TCR that specifically recognizes antigen associated with pathogenesis of autoimmune, allergic, or inflammatory condition
gcccagtcagtgacccagcctgacatccacatcactgtctctgaaggagcctcactggagttgagatgtaactattcctatggggcaacaccttatctcttctggtatgtccagtcccccggccaaggcctccagctgctcctgaagtacttttcaggagacactctggttcaaggcattaaaggctttgaggctgaatttaagaggagtcaatcttccttcaatctgaggaaaccctctgtgcattggagtgatgctgctgagtacttctgtgctgtgggccctccgctttatggaggaagccaaggaaatctcatctttggaaaaggcactaaactctctgttaaaccaa

SEQ ID NO: 563 - DNA, 343 bp, Homo sapiens
  TCR alpha and beta chain V region of TCR that specifically recognizes antigen associated with pathogenesis of autoimmune, allergic, or inflammatory condition
gaagctgaagttgcccagtcccccagatataagattacagagaaaagccaggctgtggctttttggtgtgatcctatttctggccatgctaccctttactggtaccggcagatcctgggacagggcccggagcttctggttcaatttcaggatgagagtgtagtagatgattcacagttgcctaaggatcgattttctgcagagaggctcaaaggagtagactccactctcaagatccagcctgcagagcttggggactcggccatgtatctctgtgccagcagcccgggacactataattcacccctccactttgggaacgggaccaggctcactgtgacag

SEQ ID NO: 564 - DNA, 334 bp, Homo sapiens
  TCR alpha and beta chain V region of TCR that specifically recognizes antigen associated with pathogenesis of autoimmune, allergic, or inflammatory condition
gatgctaagaccacccagcccccctccatggattgcgctgaaggaagagctgcaaacctgccttgtaatcactctaccatcagtggaaatgagtatgtgtattggtatcgacagattcactcccaggggccacagtatatcattcatggtctaaaaaacaatgaaaccaatgaaatggcctctctgatcatcacagaagacagaaagtccagcaccttgatcctgccccacgctacgctgagagacactgctgtgtactattgcatcgtcagagtcgctgaggcaggaactgctctgatctttgggaagggaaccaccttatcagtgagttcca

SEQ ID NO: 565 - DNA, 343 bp, Homo sapiens
  TCR alpha and beta chain V region of TCR that specifically recognizes antigen associated with pathogenesis of autoimmune, allergic, or inflammatory condition
gatgtgaaagtaacccagagctcgagatatctagtcaaaaggacgggagagaaagtttttctggaatgtgtccaggatatggaccatgaaaatatgttctggtatcgacaagacccaggtctggggctacggctgatctatttctcatatgatgttaaaatgaaagaaaaaggagatattcctgaggggtacagtgtctctagagagaagaaggagcgcttctccctgattctggagtccgccagcaccaaccagacatctatgtacctctgtgccagcagccgaccgggacagttgaacactgaagctttctttggacaaggcaccagactcacagttgtag

SEQ ID NO: 566 - DNA, 334 bp, Homo sapiens
  TCR alpha and beta chain V region of TCR that specifically recognizes antigen associated with pathogenesis of autoimmune, allergic, or inflammatory condition
gcccagtcggtgacccagcttggcagccacgtctctgtctctgaaggagccctggttctgctgaggtgcaactactcatcgtctgttccaccatatctcttctggtatgtgcaataccccaaccaaggactccagcttctcctgaagtacacatcagcggccaccctggttaaaggcatcaacggttttgaggctgaatttaagaagagtgaaacctccttccacctgacgaaaccctcagcccatatgagcgacgcggctgagtacttctgtgctgtgagtgagagaggaaagcttatcttcggacagggaacggagttatctgtgaaaccca

SEQ ID NO: 567 - DNA, 334 bp, Homo sapiens
  TCR alpha and beta chain V region of TCR that specifically recognizes antigen associated with pathogenesis of autoimmune, allergic, or inflammatory condition
atactgaacgtggaacaaagtcctcagtcactgcatgttcaggagggagacagcaccaatttcacctgcagcttcccttccagcaatttttatgccttacactggtacagatgggaaactgcaaaaagccccgaggccttgtttgtaatgactttaaatggggatgaaaagaagaaaggacgaataagtgccactcttaataccaaggagggttacagctatttgtacatcaaaggatcccagcctgaagactcagccacatacctctgtgcctttatttcaggaaacacacctcttgtctttggaaagggcacaagactttctgtgattgcaa

SEQ ID NO: 568 - DNA, 346 bp, Homo sapiens
  TCR alpha and beta chain V region of TCR that specifically recognizes antigen associated with pathogenesis of autoimmune, allergic, or inflammatory condition
gatgtgaaagtaacccagagctcgagatatctagtcaaaaggacgggagagaaagtttttctggaatgtgtccaggatatggaccatgaaaatatgttctggtatcgacaagacccaggtctggggctacggctgatctatttctcatatgatgttaaaatgaaagaaaaaggagatattcctgaggggtacagtgtctctagagagaagaaggagcgcttctccctgattctggagtccgccagcaccaaccagacatctatgtacctctgtgccagcagtttatggggaggactaatgaacactgaagctttctttggacaaggcaccagactcacagttgtag

SEQ ID NO: 569 - DNA, 328 bp, Homo sapiens
  TCR alpha and beta chain V region of TCR that specifically recognizes antigen associated with pathogenesis of autoimmune, allergic, or inflammatory condition
gaagaccaggtgacgcagagtcccgaggccctgagactccaggagggagagagtagcagtctcaactgcagttacacagtcagcggtttaagagggctgttctggtataggcaagatcctgggaaaggccctgaattcctcttcaccctgtattcagctggggaagaaaaggagaaagaaaggctaaaagccacattaacaaagaaggaaagctttctgcacatcacagcccctaaacctgaagactcagccacttatctctgtgctgccgccgccgagggaggaaagcttatcttcggacagggaacggagttatctgtgaaaccca

SEQ ID NO: 570 - DNA, 343 bp, Homo sapiens
  TCR alpha and beta chain V region of TCR that specifically recognizes antigen associated with pathogenesis of autoimmune, allergic, or inflammatory condition
gatgctggagttatccagtcaccccgccatgaggtgacagagatgggacaagaagtgactctgagatgtaaaccaatttcaggccacaactcccttttctggtacagacagaccatgatgcggggactggagttgctcatttactttaacaacaacgttccgatagatgattcagggatgcccgaggatcgattctcagctaagatgcctaatgcatcattctccactctgaagatccagccctcagaacccagggactcagctgtgtacttctgtgccagcagttttctggcaggcaatcagccccagcattttggtgatgggactcgactctccatcctag

SEQ ID NO: 571 - DNA, 340 bp, Homo sapiens
  TCR alpha and beta chain V region of TCR that specifically recognizes antigen associated with pathogenesis of autoimmune, allergic, or inflammatory condition
gaccagcaagttaagcaaaattcaccatccctgagcgtccaggaaggaagaatttctattctgaactgtgactatactaacagcatgtttgattatttcctatggtacaaaaaataccctgctgaaggtcctacattcctgatatctataagttccattaaggataaaaatgaagatggaagattcactgttttcttaaacaaaagtgccaagcacctctctctgcacattgtgccctcccagcctggagactctgcagtgtacttctgtgcagcaagcgaggctggagccaatagtaagctgacatttggaaaaggaataactctgagtgttagaccag

SEQ ID NO: 572 - DNA, 340 bp, homo sapiens
  TCR alpha and beta chain V region of TCR that specifically recognizes antigen associated with pathogenesis of autoimmune, allergic, or inflammatory condition
gatgctggagttatccagtcaccccgccatgaggtgacagagatgggacaagaagtgactctgagatgtaaaccaatttcaggccacaactcccttttctggtacagacagaccatgatgcggggactggagttgctcatttactttaacaacaacgttccgatagatgattcagggatgcccgaggatcgattctcagctaagatgcctaatgcatcattctccactctgaagatccagccctcagaacccagggactcagctgtgtacttctgtgccagcagatttggacaggcgtatggctacaccttcggttcggggaccaggttaaccgttgtag

SEQ ID NO: 573 - DNA, 334 bp, Homo sapiens
  TCR alpha and beta chain V region of TCR that specifically recognizes antigen associated with pathogenesis of autoimmune, allergic, or inflammatory condition
ggtcaacagctgaatcagagtcctcaatctatgtttatccaggaaggagaagatgtctccatgaactgcacttcttcaagcatatttaacacctggctatggtacaagcaggaccctggggaaggtcctgtcctcttgatagccttatataaggctggtgaattgacctcaaatggaagactgactgctcagtttggtataaccagaaaggacagcttcctgaatatctcagcatccatacctagtgatgtaggcatctacttctgtgctagtagtggaggtagcaactataaactgacatttggaaaaggaactctcttaaccgtgaatccaa

SEQ ID NO: 574 - DNA, 343 bp, Homo sapiens
  TCR alpha and beta chain V region of TCR that specifically recognizes antigen associated with pathogenesis of autoimmune, allergic, or inflammatory condition
agtgctgtcatctctcaaaagccaagcagggatatctgtcaacgtggaacctccctgacgatccagtgtcaagtcgatagccaagtcaccatgatgttctggtaccgtcagcaacctggacagagcctgacactgatcgcaactgcaaatcagggctctgaggccacatatgagagtggatttgtcattgacaagtttcccatcagccgcccaaacctaacattctcaactctgactgtgagcaacatgagccctgaagacagcagcatatatctctgcagcgtgagcgcggacactaactatggctacaccttcggttcggggaccaggttaaccgttgtag

SEQ ID NO: 575 - DNA, 340 bp, Homo sapiens
  TCR alpha and beta chain V region of TCR that specifically recognizes antigen associated with pathogenesis of autoimmune, allergic, or inflammatory condition
ggagagaatgtggagcagcatccttcaaccctgagtgtccaggagggagacagcgctgttatcaagtgtacttattcagacagtgcctcaaactacttcccttggtataagcaagaacttggaaaaggacctcagcttattatagacattcgttcaaatgtgggcgaaaagaaagaccaacgaattgctgttacattgaacaagacagccaaacatttctccctgcacatcacagagacccaacctgaagactcggctgtctacttctgtgcagcaagtgataccggcactgccagtaaactcacctttgggactggaacaagacttcaggtcacgctcg

SEQ ID NO: 576 - DNA, 361 bp, Homo sapiens
  TCR alpha and beta chain V region of TCR that specifically recognizes antigen associated with pathogenesis of autoimmune, allergic, or inflammatory condition
ggtgctgtcgtctctcaacatccgagctgggttatctgtaagagtggaacctctgtgaagatcgagtgccgttccctggactttcaggccacaactatgttttggtatcgtcagttcccgaaacagagtctcatgctgatggcaacttccaatgagggctccaaggccacatacgagcaaggcgtcgagaaggacaagtttctcatcaaccatgcaagcctgaccttgtccactctgacagtgaccagtgcccatcctgaagacagcagcttctacatctgcagtgctagaggattcggggggttgggcgcaactaatgaaaaactgttttttggcagtggaacccagctctctgtcttgg

SEQ ID NO: 577 - DNA, 343 bp, Homo sapiens
  TCR alpha and beta chain V region of TCR that specifically recognizes antigen associated with pathogenesis of autoimmune, allergic, or inflammatory condition
gcccagtcggtgacccagcttggcagccacgtctctgtctctgaaggagccctggttctgctgaggtgcaactactcatcgtctgttccaccatatctcttctggtatgtgcaataccccaaccaaggactccagcttctcctgaagtacacatcagcggccaccctggttaaaggcatcaacggttttgaggctgaatttaagaagagtgaaacctccttccacctgacgaaaccctcagcccatatgagcgacgcggctgagtacttctgtgctgtgagtgattatactggaggcttcaaaactatctttggagcaggaacaagactatttgttaaagcaa

SEQ ID NO: 578 - DNA, 340 bp, Homo sapiens
  TCR alpha and beta chain V region of TCR that specifically recognizes antigen associated with pathogenesis of autoimmune, allergic, or inflammatory condition
gacgctggagtcacccaaagtcccacacacctgatcaaaacgagaggacagcaagtgactctgagatgctctcctaagtctgggcatgacactgtgtcctggtaccaacaggccctgggtcaggggccccagtttatctttcagtattatgaggaggaagagagacagagaggcaacttccctgatcgattctcaggtcaccagttccctaactatagctctgagctgaatgtgaacgccttgttgctgggggactcggccctctatctctgtgccagcagcggatcgacgggcacagatacgcagtattttggcccaggcacccggctgacagtgctcg

SEQ ID NO: 579 - protein, 14 aa, Homo sapiens
  junction sequence of TCR that specifically recognizes antigen associated with pathogenesis of autoimmune, allergic, or inflammatory condition
CASSLGRQGAGYTF

SEQ ID NO: 580 - protein, 14 aa, Homo sapiens
  junction sequence of TCR that specifically recognizes antigen associated with pathogenesis of autoimmune, allergic, or inflammatory condition
CALSRGTGGFKTIF

SEQ ID NO: 581 - protein, 13 aa, Homo sapiens
  junction sequence of TCR that specifically recognizes antigen associated with pathogenesis of autoimmune, allergic, or inflammatory condition
CASSGVGAYEQYF

SEQ ID NO: 582 - protein, 13 aa, Homo sapiens
  junction sequence of TCR that specifically recognizes antigen associated with pathogenesis of autoimmune, allergic, or inflammatory condition
CALRGDSSYKLIF

SEQ ID NO: 583 - protein, 17 aa, Homo sapiens
  junction sequence of TCR that specifically recognizes antigen associated with pathogenesis of autoimmune, allergic, or inflammatory condition
CASSSLKAGGGDNEQFF

SEQ ID NO: 584 - protein, 13 aa, Homo sapiens
  junction sequence of TCR that specifically recognizes antigen associated with pathogenesis of autoimmune, allergic, or inflammatory condition
CAVSERGFNKFYF

SEQ ID NO: 585 - protein, 17 aa, Homo sapiens
  junction sequence of TCR that specifically recognizes antigen associated with pathogenesis of autoimmune, allergic, or inflammatory condition
CASPPPGTGVFQETQYF

SEQ ID NO: 586 - protein, 12 aa, Homo sapiens
  junction sequence of TCR that specifically recognizes antigen associated with pathogenesis of autoimmune, allergic, or inflammatory condition
CALNYGGFKTIF

SEQ ID NO: 587 - protein, 14 aa, Homo sapiens
  junction sequence of TCR that specifically recognizes antigen associated with pathogenesis of autoimmune, allergic, or inflammatory condition
CASSFKQGNGELFF

SEQ ID NO: 588 - protein, 13 aa, Homo sapiens
  junction sequence of TCR that specifically recognizes antigen associated with pathogenesis of autoimmune, allergic, or inflammatory condition
CAVRDMDGGKLIF

SEQ ID NO: 589 - protein, 14 aa, Homo sapiens
  junction sequence of TCR that specifically recognizes antigen associated with pathogenesis of autoimmune, allergic, or inflammatory condition
CASSLDPFTDTQYF

SEQ ID NO: 590 - protein, 16 aa, Homo sapiens
  junction sequence of TCR that specifically recognizes antigen associated with pathogenesis of autoimmune, allergic, or inflammatory condition
CAYRLNYGGATNKLIF

SEQ ID NO: 591 - protein, 15 aa, Homo sapiens
  junction sequence of TCR that specifically recognizes antigen associated with pathogenesis of autoimmune, allergic, or inflammatory condition
CAVELGSGNTGKLIF

SEQ ID NO: 592 - protein, 14 aa, Homo sapiens
  junction sequence of TCR that specifically recognizes antigen associated with pathogenesis of autoimmune, allergic, or inflammatory condition
CASSARQNTGELFF

SEQ ID NO: 593 - protein, 13 aa, Homo sapiens
  junction sequence of TCR that specifically recognizes antigen associated with pathogenesis of autoimmune, allergic, or inflammatory condition
CSVDRQGGYEQYF

SEQ ID NO: 594 - protein, 17 aa, Homo sapiens
  junction sequence of TCR that specifically recognizes antigen associated with pathogenesis of autoimmune, allergic, or inflammatory condition
CAVGPPLYGGSQGNLIF

SEQ ID NO: 595 - protein, 14 aa, Homo sapiens
  junction sequence of TCR that specifically recognizes antigen associated with pathogenesis of autoimmune, allergic, or inflammatory condition
CASSPGHYNSPLHF

SEQ ID NO: 596 - protein, 14 aa, Homo sapiens
  junction sequence of TCR that specifically recognizes antigen associated with pathogenesis of autoimmune, allergic, or inflammatory condition
CIVRVAEAGTALIF

SEQ ID NO: 597 - protein, 15 aa, Homo sapiens
  junction sequence of TCR that specifically recognizes antigen associated with pathogenesis of autoimmune, allergic, or inflammatory condition
CASSRPGQLNTEAFF

SEQ ID NO: 598 - protein, 11 aa, Homo sapiens
  junction sequence of TCR that specifically recognizes antigen associated with pathogenesis of autoimmune, allergic, or inflammatory condition
CAVSERGKLIF

SEQ ID NO: 599 - protein, 12 aa, Homo sapiens
  junction sequence of TCR that specifically recognizes antigen associated with pathogenesis of autoimmune, allergic, or inflammatory condition
CAFISGNTPLVF

SEQ ID NO: 600 - protein, 16 aa, Homo sapiens
  junction sequence of TCR that specifically recognizes antigen associated with pathogenesis of autoimmune, allergic, or inflammatory condition
CASSLWGGLMNTEAFF

SEQ ID NO: 601 - protein, 12 aa, Homo sapiens
  junction sequence of TCR that specifically recognizes antigen associated with pathogenesis of autoimmune, allergic, or inflammatory condition
CAAAAEGGKLIF

SEQ ID NO: 602 - protein, 14 aa, Homo sapiens
  junction sequence of TCR that specifically recognizes antigen associated with pathogenesis of autoimmune, allergic, or inflammatory condition
CASSFLAGNQPQHF

SEQ ID NO: 603 - protein, 14 aa, Homo sapiens
  junction sequence of TCR that specifically recognizes antigen associated with pathogenesis of autoimmune, allergic, or inflammatory condition
CAASEAGANSKLTF

SEQ ID NO: 604 - protein, 13 aa, Homo sapiens
  junction sequence of TCR that specifically recognizes antigen associated with pathogenesis of autoimmune, allergic, or inflammatory condition
CASRFGQAYGYTF

SEQ ID NO: 605 - protein, 13 aa, Homo sapiens
  junction sequence of TCR that specifically recognizes antigen associated with pathogenesis of autoimmune, allergic, or inflammatory condition
CASSGGSNYKLTF

SEQ ID NO: 606 - protein, 13 aa, Homo sapiens
  junction sequence of TCR that specifically recognizes antigen associated with pathogenesis of autoimmune, allergic, or inflammatory condition
CSVSADTNYGYTF

SEQ ID NO: 607 - protein, 14 aa, Homo sapiens
  junction sequence of TCR that specifically recognizes antigen associated with pathogenesis of autoimmune, allergic, or inflammatory condition
CAASDTGTASKLTF

SEQ ID NO: 608 - protein, 18 aa, Homo sapiens
  junction sequence of TCR that specifically recognizes antigen associated with pathogenesis of autoimmune, allergic, or inflammatory condition
CSARGFGGLGATNEKLFF

SEQ ID NO: 609 - protein, 14 aa, Homo sapiens
  junction sequence of TCR that specifically recognizes antigen associated with pathogenesis of autoimmune, allergic, or inflammatory condition
CAVSDYTGGFKTIF

SEQ ID NO: 610 - protein, 14 aa, Homo sapiens
  junction sequence of TCR that specifically recognizes antigen associated with pathogenesis of autoimmune, allergic, or inflammatory condition
CASSGSTGTDTQYF

SEQ ID NO: 611 - DNA, 364 bp, Homo sapiens
  TCR alpha and beta chain V region of TCR that specifically recognizes antigen associated with pathogenesis of autoimmune, allergic, or inflammatory condition
gatactggagtctcccaggaccccagacacaagatcacaaagaggggacagaatgtaactttcaggtgtgatccaatttctgaacacaaccgcctttattggtaccgacagaccctggggcagggcccagagtttctgacttacttccagaatgaagctcaactagaaaaatcaaggctgctcagtgatcggttctctgcagagaggcctaagggatctttctccaccttggagatccagcgcacagagcagggggactcggccatgtatctctgtgccagcagcttaattccttttctggcgggagtattagctaactacaatgagcagttcttcgggccagggacacggctcaccgtgctag

SEQ ID NO: 612 - DNA, 343 bp, Homo sapiens
  TCR alpha and beta chain V region of TCR that specifically recognizes antigen associated with pathogenesis of autoimmune, allergic, or inflammatory condition
ggaaattcagtgacccagatggaagggccagtgactctctcagaagaggccttcctgactataaactgcacgtacacagccacaggatacccttcccttttctggtatgtccaatatcctggagaaggtctacagctcctcctgaaagccacgaaggctgatgacaagggaagcaacaaaggttttgaagccacataccgtaaagaaaccacttctttccacttggagaaaggctcagttcaagtgtcagactcagcggtgtacttctgtgctctgagtaatgacatggaatatggaaacaaactggtctttggcgcaggaaccattctgagagtcaagtcct

SEQ ID NO: 613 - DNA, 343 bp, Homo sapiens
  TCR alpha and beta chain V region of TCR that specifically recognizes antigen associated with pathogenesis of autoimmune, allergic, or inflammatory condition
aaggctggagtcactcaaactccaagatatctgatcaaaacgagaggacagcaagtgacactgagctgctcccctatctctgggcataggagtgtatcctggtaccaacagaccccaggacagggccttcagttcctctttgaatacttcagtgagacacagagaaacaaaggaaacttccctggtcgattctcagggcgccagttctctaactctcgctctgagatgaatgtgagcaccttggagctgggggactcggccctttatctttgcgccagcagcttatccgggaatagcaatcagccccagcattttggtgatgggactcgactctccatcctag

SEQ ID NO: 614 - DNA, 334 bp, Homo sapiens
  TCR alpha and beta chain V region of TCR that specifically recognizes antigen associated with pathogenesis of autoimmune, allergic, or inflammatory condition
atactgaacgtggaacaaagtcctcagtcactgcatgttcaggagggagacagcaccaatttcacctgcagcttcccttccagcaatttttatgccttacactggtacagatgggaaactgcaaaaagccccgaggccttgtttgtaatgactttaaatggggatgaaaagaagaaaggacgaataagtgccactcttaataccaaggagggttacagctatttgtacatcaaaggatcccagcctgaagactcagccacatacctctgtgcctttggtggtgctacaaacaagctcatctttggaactggcactctgcttgctgtccagccaa

SEQ ID NO: 615 - DNA, 337 bp, Homo sapiens
  TCR alpha and beta chain V region of TCR that specifically recognizes antigen associated with pathogenesis of autoimmune, allergic, or inflammatory condition
tctcagactattcatcaatggccagcgaccctggtgcagcctgtgggcagcccgctctctctggagtgcactgtggagggaacatcaaaccccaacctatactggtaccgacaggctgcaggcaggggcctccagctgctcttctactccgttggtattggccagatcagctctgaggtgccccagaatctctcagcctccagaccccaggaccggcagttcatcctgagttctaagaagctccttctcagtgactctggcttctatctctgtgcctggagtgtacgtggggatcagccccagcattttggtgatgggactcgactctccatcctag

SEQ ID NO: 616 - DNA, 331 bp, Homo sapiens
  TCR alpha and beta chain V region of TCR that specifically recognizes antigen associated with pathogenesis of autoimmune, allergic, or inflammatory condition
gaagaccaggtgacgcagagtcccgaggccctgagactccaggagggagagagtagcagtctcaactgcagttacacagtcagcggtttaagagggctgttctggtataggcaagatcctgggaaaggccctgaattcctcttcaccctgtattcagctggggaagaaaaggagaaagaaaggctaaaagccacattaacaaagaaggaaagctttctgcacatcacagcccctaaacctgaagactcagccacttatctctgtgctgtgctttatggcggatctgaaaagctggtctttggaaagggaacgaaactgacagtaaacccat

SEQ ID NO: 617 - DNA, 343 bp, Homo sapiens
  TCR alpha and beta chain V region of TCR that specifically recognizes antigen associated with pathogenesis of autoimmune, allergic, or inflammatory condition
aaggctggagtcactcaaactccaagatatctgatcaaaacgagaggacagcaagtgacactgagctgctcccctatctctgggcataggagtgtatcctggtaccaacagaccccaggacagggccttcagttcctctttgaatacttcagtgagacacagagaaacaaaggaaacttccctggtcgattctcagggcgccagttctctaactctcgctctgagatgaatgtgagcaccttggagctgggggactcggccctttatctttgcgccagcagacccgggaccataaatcaagagacccagtacttcgggccaggcacgcggctcctggtgctcg

SEQ ID NO: 618 - DNA, 340 bp, Homo sapiens
  TCR alpha and beta chain V region of TCR that specifically recognizes antigen associated with pathogenesis of autoimmune, allergic, or inflammatory condition
ggagagagtgtggggctgcatcttcctaccctgagtgtccaggagggtgacaactctattatcaactgtgcttattcaaacagcgcctcagactacttcatttggtacaagcaagaatctggaaaaggtcctcaattcattatagacattcgttcaaatatggacaaaaggcaaggccaaagagtcaccgttttattgaataagacagtgaaacatctctctctgcaaattgcagctactcaacctggagactcagctgtctacttttgtgcagagaataaggtttcagatggccagaagctgctctttgcaagggggaccatgttaaaggtggatctta

SEQ ID NO: 619 - DNA, 346 bp, Homo sapiens
  TCR alpha and beta chain V region of TCR that specifically recognizes antigen associated with pathogenesis of autoimmune, allergic, or inflammatory condition
ggtgctggagtctcccagacccccagtaacaaggtcacagagaagggaaaatatgtagagctcaggtgtgatccaatttcaggtcatactgccctttactggtaccgacaaagcctggggcagggcccagagtttctaatttacttccaaggcacgggtgcggcagatgactcagggctgcccaacgatcggttctttgcagtcaggcctgagggatccgtctctactctgaagatccagcgcacagagcggggggactcagccgtgtatctctgtgccagcagctcaaacccgcgggataactatggctacaccttcggttcggggaccaggttaaccgttgtag

SEQ ID NO: 620 - DNA, 328 bp, Homo sapiens
  TCR alpha and beta chain V region of TCR that specifically recognizes antigen associated with pathogenesis of autoimmune, allergic, or inflammatory condition
cttgctaagaccacccagcccatctccatggactcatatgaaggacaagaagtgaacataacctgtagccacaacaacattgctacaaatgattatatcacgtggtaccaacagtttcccagccaaggaccacgatttattattcaaggatacaagacaaaagttacaaacgaagtggcctccctgtttatccctgccgacagaaagtccagcactctgagcctgccccgggtttccctgagcgacactgctgtgtactactgcctcgtgggggaatatggaaacaagctggtctttggcgcaggaaccattctgagagtcaagtcct

SEQ ID NO: 621 - DNA, 346 bp, Homo sapiens
  TCR alpha and beta chain V region of TCR that specifically recognizes antigen associated with pathogenesis of autoimmune, allergic, or inflammatory condition
gatgctggagttatccagtcaccccgccatgaggtgacagagatgggacaagaagtgactctgagatgtaaaccaatttcaggccacaactcccttttctggtacagacagaccatgatgcggggactggagttgctcatttactttaacaacaacgttccgatagatgattcagggatgcccgaggatcgattctcagctaagatgcctaatgcatcattctccactctgaagatccagccctcagaacccagggactcagctgtgtacttctgtgccagcaaattcccgtggggggctgtcggggagctgttttttggagaaggctctaggctgaccgtactgg

SEQ ID NO: 622 - DNA, 343 bp, Homo sapiens
  TCR alpha and beta chain V region of TCR that specifically recognizes antigen associated with pathogenesis of autoimmune, allergic, or inflammatory condition
ggagagaatgtggagcagcatccttcaaccctgagtgtccaggagggagacagcgctgttatcaagtgtacttattcagacagtgcctcaaactacttcccttggtataagcaagaacttggaaaaggacctcagcttattatagacattcgttcaaatgtgggcgaaaagaaagaccaacgaattgctgttacattgaacaagacagccaaacatttctccctgcacatcacagagacccaacctgaagactcggctgtctacttctgtgcagcaagtaaagggtctagcaacacaggcaaactaatctttgggcaagggacaactttacaagtaaaaccag

SEQ ID NO: 623 - DNA, 349 bp, Homo sapiens
  TCR alpha and beta chain V region of TCR that specifically recognizes antigen associated with pathogenesis of autoimmune, allergic, or inflammatory condition
gatgctggaatcacccagagcccaagacacaaggtcacagagacaggaacaccagtgactctgagatgtcaccagactgagaaccaccgctatatgtactggtatcgacaagacccggggcatgggctgaggctgatccattactcatatggtgttaaagatactgacaaaggagaagtctcagatggctatagtgtctctagatcaaagacagaggatttcctcctcactctggagtccgctaccagctcccagacatctgtgtacttctgtgccatcaccccgggacagggggcgaagggtggagagacccagtacttcgggccaggcacgcggctcctggtgctcg

SEQ ID NO: 624 - DNA, 346 bp, Homo sapiens
  TCR alpha and beta chain V region of TCR that specifically recognizes antigen associated with pathogenesis of autoimmune, allergic, or inflammatory condition
gctcagacagtcactcagtctcaaccagagatgtctgtgcaggaggcagagaccgtgaccctgagctgcacatatgacaccagtgagagtgattattatttattctggtacaagcagcctcccagcaggcagatgattctcgttattcgccaagaagcttataagcaacagaatgcaacagagaatcgtttctctgtgaacttccagaaagcagccaaatccttcagtctcaagatctcagactcacagctgggggatgccgcgatgtatttctgtgcttaccgggggtctaaccagggaggaaagcttatcttcggacagggaacggagttatctgtgaaaccca

SEQ ID NO: 625 - DNA, 355 bp, Homo sapiens
  TCR alpha and beta chain V region of TCR that specifically recognizes antigen associated with pathogenesis of autoimmune, allergic, or inflammatory condition
ggagctggagtctcccagtcccccagtaacaaggtcacagagaagggaaaggatgtagagctcaggtgtgatccaatttcaggtcatactgccctttactggtaccgacagagcctggggcagggcctggagtttttaatttacttccaaggcaacagtgcaccagacaaatcagggctgcccagtgatcgcttctctgcagagaggactgggggatccgtctccactctgacgatccagcgcacacagcaggaggactcggccgtgtatctctgtgccagcagctaccgtttgatgggtagcgggagtagggagacccagtacttcgggccaggcacgcggctcctggtgctcg

SEQ ID NO: 626 - DNA, 334 bp, Homo sapiens
  TCR alpha and beta chain V region of TCR that specifically recognizes antigen associated with pathogenesis of autoimmune, allergic, or inflammatory condition
ggaaattcagtgacccagatggaagggccagtgactctctcagaagaggccttcctgactataaactgcacgtacacagccacaggatacccttcccttttctggtatgtccaatatcctggagaaggtctacagctcctcctgaaagccacgaaggctgatgacaagggaagcaacaaaggttttgaagccacataccgtaaagaaaccacttctttccacttggagaaaggctcagttcaagtgtcagactcagcggtgtacttctgtgctctgcacggaggaagctacatacctacatttggaagaggaaccagccttattgttcatccgt

SEQ ID NO: 627 - DNA, 343 bp, Homo sapiens
  TCR alpha and beta chain V region of TCR that specifically recognizes antigen associated with pathogenesis of autoimmune, allergic, or inflammatory condition
ggagattcagtgacccagatggaagggccagtgactctctcagaagaggccttcctgactataaactgcacgtacacagccacaggatacccttcccttttctggtatgtccaatatcctggagaaggtctacagctcctcctgaaagccacgaaggctgatgacaagggaagcaacaaaggttttgaagccacataccgtaaggaaaccacttctttccacttggagaaaggctcagttcaagtgtcagactcagcggtgtacttctgtgctctgagtgatcggggaaccagtggctctaggttgacctttggggaaggaacacagctcacagtgaatcctg

SEQ ID NO: 628 - DNA, 346 bp, Homo sapiens
  TCR alpha and beta chain V region of TCR that specifically recognizes antigen associated with pathogenesis of autoimmune, allergic, or inflammatory condition
ggagctggagtctcccagtcccccagtaacaaggtcacagagaagggaaaggatgtagagctcaggtgtgatccaatttcaggtcatactgccctttactggtaccgacagagcctggggcagggcctggagtttttaatttacttccaaggcaacagtgcaccagacaaatcagggctgcccagtgatcgcttctctgcagagaggactgggggatccgtctccactctgacgatccagcgcacacagcaggaggactcggccgtgtatctctgtgccagcagccgatggacagggggcaattacgagcagtacttcgggccgggcaccaggctcacggtcacag

SEQ ID NO: 629 - DNA, 346 bp, Homo sapiens
  TCR alpha and beta chain V region of TCR that specifically recognizes antigen associated with pathogenesis of autoimmune, allergic, or inflammatory condition
ggagagaatgtggagcagcatccttcaaccctgagtgtccaggagggagacagcgctgttatcaagtgtacttattcagacagtgcctcaaactacttcccttggtataagcaagaacttggaaaaagacctcagcttattatagacattcgttcaaatgtgggcgaaaagaaagaccaacgaattgctgttacattgaacaagacagccaaacatttctccctgcacatcacagagacccaacctgaagactcggctgtctacttctgtgcagcaagtaggggaggctctagcaacacaggcaaactaatctttgggcaagggacaactttacaagtaaaaccag

SEQ ID NO: 630 - DNA, 346 bp, Homo sapiens
  TCR alpha and beta chain V region of TCR that specifically recognizes antigen associated with pathogenesis of autoimmune, allergic, or inflammatory condition
gatgctggaatcacccagagcccaagacacaaggtcacagagacaggaacaccagtgactctgagatgtcaccagactgagaaccaccgctatatgtactggtatcgacaagacccggggcatgggctgaggctgatccattactcatatggtgttaaagatactgacaaaggagaagtctcagatggctatagtgtctctagatcaaagacagaggatttcctcctcactctggagtccgctaccagctcccagacatctgtgtacttctgtgccatcgggacagggccaacccgcggtacctacgagcagtacttcgggccgggcaccaggctcacggtcacag

SEQ ID NO: 631 - DNA, 340 bp, Homo sapiens
  TCR alpha and beta chain V region of TCR that specifically recognizes antigen associated with pathogenesis of autoimmune, allergic, or inflammatory condition
gcccagtcagtgacccagcctgacatccacatcactgtctctgaaggagcctcactggagttgagatgtaactattcctatggggcaacaccttatctcttctggtatgtccagtcccccggccaaggcctccagctgctcctgaagtacttttcaggagacactctggttcaaggcattaaaggctttgaggctgaatttaagaggagtcaatcttccttcaatctgaggaaaccctctgtgcattggagtgatgctgctgagtacttctgtgctgtgggtgcgggtaacaatgccagactcatgtttggagatggaactcagctggtggtgaagccca

SEQ ID NO: 632 - DNA, 340 bp, Homo sapiens
  TCR alpha and beta chain V region of TCR that specifically recognizes antigen associated with pathogenesis of autoimmune, allergic, or inflammatory condition
gaacctgaagtcacccagactcccagccatcaggtcacacagatgggacaggaagtgatcttgcgctgtgtccccatctctaatcacttatacttctattggtacagacaaatcttggggcagaaagtcgagtttctggtttccttttataataatgaaatctcagagaagtctgaaatattcgatgatcaattctcagttgaaaggcctgatggatcaaatttcactctgaagatccggtccacaaagctggaggactcagccatgtacttctgtgccggagcccagcgggctaatgaaaaactgttttttggcagtggaacccagctctctgtcttgg

SEQ ID NO: 633 - DNA, 328 bp, Homo sapiens
  TCR alpha and beta chain V region of TCR that specifically recognizes antigen associated with pathogenesis of autoimmune, allergic, or inflammatory condition
cggaaggaggtggagcaggatcctggacccttcaatgttccagagggagccactgtcgctttcaactgtacttacagcaacagtgcttctcagtctttcttctggtacagacaggattgcaggaaagaacctaagttgctgatgtccgtatactccagtggtaatgaagatggaaggtttacagcacagctcaatagagccagccagtatatttccctgctcatcagagactccaagctcagtgattcagccacctacctctgtgtggtgaacggaggaagctacatacctacatttggaagaggaaccagccttattgttcatccgt

SEQ ID NO: 634 - protein, 21 aa, Homo sapiens
  junction sequence of TCR that specifically recognizes antigen associated with pathogenesis of autoimmune, allergic, or inflammatory condition
CASSLIPFLAGVLANYNEQFF

SEQ ID NO: 635 - protein, 15 aa, Homo sapiens
  junction sequence of TCR that specifically recognizes antigen associated with pathogenesis of autoimmune, allergic, or inflammatory condition
CALSNDMEYGNKLVF

SEQ ID NO: 636 - protein, 15 aa, Homo sapiens
  junction sequence of TCR that specifically recognizes antigen associated with pathogenesis of autoimmune, allergic, or inflammatory condition
CASSLSGNSNQPQHF

SEQ ID NO: 637 - protein, 12 aa, Homo sapiens
  junction sequence of TCR that specifically recognizes antigen associated with pathogenesis of autoimmune, allergic, or inflammatory condition
CAFGGATNKLIF

SEQ ID NO: 638 - protein, 13 aa, Homo sapiens
  junction sequence of TCR that specifically recognizes antigen associated with pathogenesis of autoimmune, allergic, or inflammatory condition
CAWSVRGDQPQHF

SEQ ID NO: 639 - protein, 13 aa, Homo sapiens
  junction sequence of TCR that specifically recognizes antigen associated with pathogenesis of autoimmune, allergic, or inflammatory condition
CAVLYGGSEKLVF

SEQ ID NO: 640 - protein, 15 aa, Homo sapiens
  junction sequence of TCR that specifically recognizes antigen associated with pathogenesis of autoimmune, allergic, or inflammatory condition
CASRPGTINQETQYF

SEQ ID NO: 641 - protein, 14 aa, Homo sapiens
  junction sequence of TCR that specifically recognizes antigen associated with pathogenesis of autoimmune, allergic, or inflammatory condition
CAENKVSDGQKLLF

SEQ ID NO: 642 - protein, 15 aa, Homo sapiens
  junction sequence of TCR that specifically recognizes antigen associated with pathogenesis of autoimmune, allergic, or inflammatory condition
CASSSNPRDNYGYTF

SEQ ID NO: 643 - protein, 12 aa, Homo sapiens
  junction sequence of TCR that specifically recognizes antigen associated with pathogenesis of autoimmune, allergic, or inflammatory condition
CLVGEYGNKLVF

SEQ ID NO: 644 - protein, 15 aa, Homo sapiens
  junction sequence of TCR that specifically recognizes antigen associated with pathogenesis of autoimmune, allergic, or inflammatory condition
CASKFPWGAVGELFF

SEQ ID NO: 645 - protein, 15 aa, Homo sapiens
  junction sequence of TCR that specifically recognizes antigen associated with pathogenesis of autoimmune, allergic, or inflammatory condition
CAASKGSSNTGKLIF

SEQ ID NO: 646 - protein, 17 aa, Homo sapiens
  junction sequence of TCR that specifically recognizes antigen associated with pathogenesis of autoimmune, allergic, or inflammatory condition
CAITPGQGAKGGETQYF

SEQ ID NO: 647 - protein, 14 aa, Homo sapiens
  junction sequence of TCR that specifically recognizes antigen associated with pathogenesis of autoimmune, allergic, or inflammatory condition
CAYRGSNQGGKLIF

SEQ ID NO: 648 - protein, 18 aa, Homo sapiens
  junction sequence of TCR that specifically recognizes antigen associated with pathogenesis of autoimmune, allergic, or inflammatory condition
CASSYRLMGSGSRETQYF

SEQ ID NO: 649 - protein, 12 aa, Homo sapiens
  junction sequence of TCR that specifically recognizes antigen associated with pathogenesis of autoimmune, allergic, or inflammatory condition
CALHGGSYIPTF

SEQ ID NO: 650 - protein, 15 aa, Homo sapiens
  junction sequence of TCR that specifically recognizes antigen associated with pathogenesis of autoimmune, allergic, or inflammatory condition
CALSDRGTSGSRLTF

SEQ ID NO: 651 - protein, 15 aa, Homo sapiens
  junction sequence of TCR that specifically recognizes antigen associated with pathogenesis of autoimmune, allergic, or inflammatory condition
CASSRWTGGNYEQYF

SEQ ID NO: 652 - protein, 16 aa, Homo sapiens
  junction sequence of TCR that specifically recognizes antigen associated with pathogenesis of autoimmune, allergic, or inflammatory condition
CAASRGGSSNTGKLIF

SEQ ID NO: 653 - protein, 16 aa, Homo sapiens
  junction sequence of TCR that specifically recognizes antigen associated with pathogenesis of autoimmune, allergic, or inflammatory condition
CAIGTGPTRGTYEQYF

SEQ ID NO: 654 - protein, 13 aa, Homo sapiens
  junction sequence of TCR that specifically recognizes antigen associated with pathogenesis of autoimmune, allergic, or inflammatory condition
CAVGAGNNARLMF

SEQ ID NO: 655 - protein, 13 aa, Homo sapiens
  junction sequence of TCR that specifically recognizes antigen associated with pathogenesis of autoimmune, allergic, or inflammatory condition
CAGAQRANEKLFF

SEQ ID NO: 656 - protein, 12 aa, Homo sapiens
  junction sequence of TCR that specifically recognizes antigen associated with pathogenesis of autoimmune, allergic, or inflammatory condition
CVVNGGSYIPTF

SEQ ID NO: 657 - protein, 20 aa, Homo sapiens
  antigenic epitope recognized by specific TCR for a CYP2D6 antigen associated with autoimmune hepatitis type 2
RRFEYDDPRFLRLLDLAQEG

SEQ ID NO: 658 - protein, 20 aa, Homo sapiens
  antigenic epitope recognized by specific TCR for a CYP2D6 antigen associated with autoimmune hepatitis type 2
AGMVTTSTTLAWGLLLMILH

SEQ ID NO: 659 - protein, 20 aa, Homo sapiens
  antigenic epitope recognized by specific TCR for a CYP2D6 antigen associated with autoimmune hepatitis type 2
TLAWGLLLMILHPDVQRRVQ

SEQ ID NO: 660 - protein, 20 aa, Homo sapiens
  antigenic epitope recognized by specific TCR for a CYP2D6 antigen associated with autoimmune hepatitis type 2
TTLITNLSSVLKDEAVWEKP

SEQ ID NO: 661 - protein, 52 aa, Homo sapiens
  antigenic epitope recognized by specific TCR for a CYP2D6 antigen associated with autoimmune hepatitis type 2
LAWTPVVVLNGLAAVREALVTHGEDTADRPPVPITQILGFGPRSQGVFLARY

SEQ ID NO: 662 - protein, 36 aa, Homo sapiens
  antigenic epitope recognized by specific TCR for a CYP2D6 antigen associated with autoimmune hepatitis type 2
LLDKAVSNVIASLTCGRRFEYDDPRFLRLLDLAQEG

SEQ ID NO: 663 - protein, 44 aa, Homo sapiens
  antigenic epitope recognized by specific TCR for a CYP2D6 antigen associated with autoimmune hepatitis type 2
SGFLREVLNAVPVLLHIPALAGKVLRFQKAFLTQLDELLTEHRM

SEQ ID NO: 664 - protein, 20 aa, Homo sapiens
  antigenic epitope recognized by specific TCR for a CYP2D6 antigen associated with autoimmune hepatitis type 2
KAKGNPESSFNDENLRIVVA

SEQ ID NO: 665 - protein, 44 aa, Homo sapiens
  antigenic epitope recognized by specific TCR for a CYP2D6 antigen associated with autoimmune hepatitis type 2
AGMVTTSTTLAWGLLLMILHPDVQRRVQQEIDDVIGQVRRPEMG

SEQ ID NO: 666 - protein, 36 aa, Homo sapiens
  antigenic epitope recognized by specific TCR for a CYP2D6 antigen associated with autoimmune hepatitis type 2
MTSRDIEVQGFRIPKGTTLITNLSSVLKDEAVWEKP

SEQ ID NO: 667 - protein, 28 aa, Homo sapiens
  antigenic epitope recognized by specific TCR for a CYP2D6 antigen associated with autoimmune hepatitis type 2
WEKPFRFHPEHFLDAQGHFVKPEAFLPF

SEQ ID NO: 668 - protein, 9 aa, Homo sapiens
  antigenic epitope recognized by specific TCR for a CYP2D6 antigen associated with autoimmune hepatitis type 2
RLLDLAEGL

SEQ ID NO: 669 - protein, 10 aa, Homo sapiens
  antigenic epitope recognized by specific TCR for a CYP2D6 antigen associated with autoimmune hepatitis type 2
GLEALVPLAV

SEQ ID NO: 670 - protein, 10 aa, Homo sapiens
  antigenic epitope recognized by specific TCR for a CYP2D6 antigen associated with autoimmune hepatitis type 2
KAFLTQLDEL

SEQ ID NO: 671 - protein, 10 aa, Homo sapiens
  antigenic epitope recognized by specific TCR for a CYP2D6 antigen associated with autoimmune hepatitis type 2
TTLITNLSSV

SEQ ID NO: 672 - protein, 10 aa, Homo sapiens
  antigenic epitope recognized by specific TCR for a CYP2D6 antigen associated with autoimmune hepatitis type 2
LLDKAVSNVI

SEQ ID NO: 673 - protein, 8 aa, Homo sapiens
  antigenic epitope recognized by specific TCR for a CYP2D6 antigen associated with autoimmune hepatitis type 2
DPAQPPRD

SEQ ID NO: 674 - protein, 20 aa, Homo sapiens
  antigenic epitope recognized by specific TCR for a CYP2D6 antigen associated with autoimmune hepatitis type 2
RRFEYDDPRFLRLLDLAQEG

SEQ ID NO: 675 - protein, 20 aa, Homo sapiens
  antigenic epitope recognized by specific TCR for a CYP2D6 antigen associated with autoimmune hepatitis type 2
ELLTEHRMTWDPAQPPRDLT

SEQ ID NO: 676 - protein, 20 aa, Homo sapiens
  antigenic epitope recognized by specific TCR for a CYP2D6 antigen associated with autoimmune hepatitis type 2
PRDLTEAFLAEMEKAKGNPE

SEQ ID NO: 677 - protein, 20 aa, Homo sapiens
  antigenic epitope recognized by specific TCR for a CYP2D6 antigen associated with autoimmune hepatitis type 2
QRRVQQEIDDVIGQVRRPEM

SEQ ID NO: 678 - protein, 20 aa, Homo sapiens
  antigenic epitope recognized by specific TCR for a CYP2D6 antigen associated with autoimmune hepatitis type 2
GMTHMTSRDIEVQGFRIPKG

SEQ ID NO: 679 - protein, 20 aa, Homo sapiens
  antigenic epitope recognized by specific TCR for a CYP2D6 antigen associated with autoimmune hepatitis type 2".
EHFLDAQGHFVKPEAFLPFS

SEQ ID NO: 680 - protein, 13 aa, Homo sapiens
  antigenic epitope recognized by specific TCR for a CYP2D6 antigen associated with autoimmune hepatitis type 2
EHRMTWDPAQPPR

SEQ ID NO: 681 - protein, 31 aa, Homo sapiens
  antigenic epitope recognized by specific TCR for a CYP2D6 antigen associated with autoimmune hepatitis type 2
MILHPDVQRRVQQEIDDVIGQVRRPEMGDQA

SEQ ID NO: 682 - protein, 17 aa, Homo sapiens
  antigenic epitope recognized by specific TCR for a CYP2D6 antigen associated with autoimmune hepatitis type 2
GVTHMTSRDIEVQGFRI

SEQ ID NO: 683 - protein, 20 aa, Homo sapiens
  antigenic epitope recognized by specific TCR for a CYP2D6 antigen associated with autoimmune hepatitis type 2
EKPFRFHPEHFLDAQGHFVK

SEQ ID NO: 684 - protein, 13 aa, Homo sapiens
  antigenic epitope recognized by specific TCR for a CYP2D6 antigen associated with autoimmune hepatitis type 2
EHRMTWDPAQPPR

SEQ ID NO: 685 - protein, 23 aa, Homo sapiens
  antigenic epitope recognized by specific TCR for a CYP2D6 antigen associated with autoimmune hepatitis type 2
EYDDPRFLRLLDLAQEGLKEESG

SEQ ID NO: 686 - protein, 14 aa, Homo sapiens
  antigenic epitope recognized by specific TCR for an antigen associated with bullous pemphigoid
RSILPYGDSMDRIE

SEQ ID NO: 687 - protein, 14 aa, Homo sapiens
  antigenic epitope recognized by specific TCR for an antigen associated with bullous pemphigoid
RSILPYGDSMDRIE

SEQ ID NO: 688 - protein, 14 aa, Homo sapiens
  antigenic epitope recognized by specific TCR for an antigen associated with bullous pemphigoid
KDRLQGMAPAAGAD

SEQ ID NO: 689 - protein, 14 aa, Homo sapiens
  antigenic epitope recognized by specific TCR for an antigen associated with bullous pemphigoid
KDRLQGMAPAAGAD

SEQ ID NO: 690 - protein, 14 aa, Homo sapiens
  antigenic epitope recognized by specific TCR for an antigen associated with bullous pemphigoid
KDRLQGMAPAAGAD

SEQ ID NO: 691 - protein, 1011 aa, Homo sapiens
  antigenic epitope recognized by specific TCR for an antigen associated with bullous pemphigoid
IALAEEVRKLKARVDELERIRRSILPYGDSMDRIEKDRLQGMAPAAGADLDKIGLHSDSQEELWMFVRKKLMMEQENGNLRGSPGPKGDMGSPGPKGDRGFPGTPGIPGPLGHPGPQGPKGQKGSVGDPGMEGPMGQRGREGPMGPRGEAGPPGSGEKGERGAAGEPGPHGPPGVPGSVGPKGSSGSPGPQGPPGPVGLQGLRGEVGLPGVKGDKGPMGPPGPKGDQGEKGPRGLTGEPGMRGLPGAVGEPGAKGAMGPAGPDGHQGPRGEQGLTGMPGIRGPPGPSGDPGKPGLTGPQGPQGLPGTPGRPGIKGEPGAPGKIVTSEGSSMLTVPGPPGPPGAMGPPGPPGAPGPAGPAGLPGHQEVLNLQGPPGPPGPRGPPGPSIPGPPGPRGPPGEGLPGPPGPPGSFLSNSETFLSGPPGPPGPPGPKGDQGPPGPRGHQGEQGLPGFSTSGSSSFGLNLQGPPGPPGPQGPKGDKGDPGVPGALGIPSGPSEGGSSSTMYVSGPPGPPGPPGPPGSISSSGQEIQQYISEYMQSDSIRSYLSGVQGPPGPPGPPGPVTTITGETFDYSELASHVVSYLRTSGYGVSLFSSSISSEDILAVLQRDDVRQYLRQYLMGPRGPPGPPGASGDGSLLSLDYAELSSRILSYMSSSGISIGLPGPPGPPGLPGTSYEELLSLLRGSEFRGIVGPPGPPGPPGIPGNVWSSISVEDLSSYLHTAGLSFIPGPPGPPGPPGPRGPPGVSGALATYAAENSDSFRSELISYLTSPDVRSFIVGPPGPPGPQGPPGDSRLLSTDASHSRGSSSSSHSSSVRRGSSYSSSMSTGGGGAGSLGAGGAFGEAAGDRGPYGTDIGPGGGYGAAAEGGMYAGNGGLLGADFAGDLDYNELAVRVSESMQRQGLLQGMAYTVQGPPGQPGPQGPPGISKVFSAYSNVTADLMDFFQTYGAIQGPPGQKEMGTPGPKGDRGPAGPPGHPGPPGPRGHKGEKGDKGDQVYAGRRRRRSIAVKP

SEQ ID NO: 692 - protein, 321 aa, Homo sapiens
  antigenic epitope recognized by specific TCR for an antigen associated with bullous pemphigoid
EEVRKLKARVDELERIRRSILPYGDSMDRIEKDRLQGMAPAAGADLDKIGLHSDSQEELWMFVRKKLMMEQENGNLRGSPGPKGDMGSPGPKGDRGFPGTPGIPGPLGHPGPQGPKGQKGSVGDPGMEGPMGQRGREGPMGPRGEAGPPGSGEKGERGAAGEPGPHGPPGVPGSVGPKGSSGSPGPQGPPGPVGLQGLRGEVGLPGVKGDKGPMGPPGPKGDQGEKGPRGLTGEPGMRGLPGAVGEPGAKGAMGPAGPHQGPRGEQGLTGMPGIRGPPGPSGDPGKPGLTGPQGPQGLPGTPGRPGIKGEPGAPGKIVTSE

SEQ ID NO: 693 - protein, 70 aa, Homo sapiens
  antigenic epitope recognized by specific TCR for an antigen associated with bullous pemphigoid
WLLGLLLTWLLLLGLLFGLIALAEEVRKLKARVDELERIRRSILPYGDSMDRIEKDRLQGMAPAAGADLD

SEQ ID NO: 694 - protein, 31 aa, Homo sapiens
  antigenic epitope recognized by specific TCR for an antigen associated with bullous pemphigoid
KIGLHSDSQEELWMFVRKKLMMEQENGNLRG

SEQ ID NO: 695 - protein, 417 aa, Homo sapiens
  antigenic epitope recognized by specific TCR for an antigen associated with bullous pemphigoid
TTITGETFDYSELASHVVSYLRTSGYGVSLFSSSISSEDILAVLQRDDVRQYLRQYLMGPRGPPGPPGASGDGSLLSLDYAELSSRILSYMSSSGISIGLPGPPGPPGLPGTSYEELLSLLRGSEFRGIVGPPGPPGPPGIPGNVWSSISVEDLSSYLHTAGLSFIPGPPGPPGPPGPRGPPGVSGALATYAAENSDSFRSELISYLTSPDVRSFIVGPPGPPGPQGPPGDSRLLSTDASHSRGSSSSSHSSSVRRGSSYSSSMSTGGGGAGSLGAGGAFGEAAGDRGPYGTDIGPGGGYGAAAEGGMYAGNGGLLGADFAGDLDYNELAVVSESMQRQGLLQGMAYTVQGPPGQPGPQGPPGISKVFSAYSNVTADLMDFFQTYGAIQGPPGQKGEMGTPGPKGDRGPAGPPGHPG

SEQ ID NO: 696 - protein, 114 aa, Homo sapiens
  antigenic epitope recognized by specific TCR for an antigen associated with bullous pemphigoid
EGGMYAGNGGLLGADFAGDLDYNELAVRVSESMQRQGLLQGMAYTVQGPPGQPGPQGPPGISKVFSAYSNVTADLMDFFQTYGAIQGPPGQKGEMGTPGPKGDRGPAGPPGHPG

SEQ ID NO: 697 - protein, 769 aa, Homo sapiens
  antigenic epitope recognized by specific TCR for an antigen associated with bullous pemphigoid
DFEMTVKECQHSGELSSRNTGHLHPTPRSPLLRWTQEPQPLEEKWQHRVVEQIPKEVQFQPPGAPLEKEKSQQCYSEYFSQTSTELQITFDETNPITRLSEIEKIRDQALNNSRPPVRYQDNACEMELVKVLTPLEIAKNKQYDMHTEVTTLKQEKNPVPSAEEWMLEGCRASGGLKKGDFLKKGLEPETFQNFDGDHACSVRDDEFKFQGLRHTVTARQLVEAKLLDMRTIEQLRLGLKTVEEVQKTLNKFLTKATSIAGLYLESTKEKISFASAAERIIIDKMVALAFLEAQAATGFIIDPISGQTYSVEDAVLKGVVDPEFRIRLLEAEKAAVGYSYSSKTLSVFQAMENRMLDRQKGKHILEAQIASGGVIDPVRGIRVPPEIALQQGLLNNAILQFLHEPSSNTRVFPNPNNKQALYYSELLRMCVFDVESQCFLFPFGERNISNLNVKKTHRISVVDTKTGSELTVYEAFQRNLIEKSIYLELSGQQYQWKEAMFFESYGHSSHMLTDTKTGLHFNINEAIEQGTIDKALVKKYQEGLITLTELADSLLSRLVPKKDLHSPVAGYWLTASGERISVLKASRRNLVDRITALRCLEAQVSTGGIIDPLTGKKYRVAEALHRGLVDEGFAQQLRQCELVITGIGHPITNKMMSVVEAVNANIINKEMGIRCLEFQYLTGGLIEPQVHSRLSIEEALQVGIIDVLIATKLKDQKSYVRNIICPQTKRKLTYKEALEKADFDFHTGLKLLEVSEPLMTGISSLYYSS

SEQ ID NO: 698 - protein, 573 aa, Homo sapiens
  antigenic epitope recognized by specific TCR for an antigen associated with bullous pemphigoid
DHACSVRDDEFKFQGLRHTVTARQLVEAKLLDMRTIEQLRLGLKTVEEVQKTLNKFLTKATSIAGLYLESTKEKISFASAAERIIIDKMVALAFLEAQAATGFIIDPISGQTYSVEDAVLKGVVDPEFRIRLLEAEKAAVGYSYSSKTLSVFQAMENRMLDRQKGKHILEAQIASGGVIDPVRGIRVPPEIALQQGLLNNAILQFLHEPSSNTRVFPNPNNKQALYYSELLRMCVFDVESQCFLFPFGERNISNLNVKKTHRISVVDTKTGSELTVYEAFQRNLIEKSIYLELSGQQYQWKEAMFFESYGHSSHMLTDTKTGLHFNINEAIEQGTIDKALVKKYQEGLITLTELADSLLSRLVPKKDLHSPVAGYWLTASGERISVLKASRRNLVDRITALRCLEAQVSTGGIIDPLTGKKYRVAEALHRGLVDEGFAQQLRQCELVITGIGHPITNKMMSVVEAVNANIINKEMGIRCLEFQYLTGGLIEPQVHSRLSIEEALQVGIIDVLIATKLKDQKSYVRNIICPQTKRKLTYKEALEKADFDFHTGLKLLEVSEPLMTGISSLYYSS

SEQ ID NO: 699 - protein, 1307 aa, Homo sapiens
  antigenic epitope recognized by specific TCR for an antigen associated with bullous pemphigoid
MHSSSYSYRSSDSVFSNTTSTRTSLDSNENLLLVHCGPTLINSCISFGSESFDGHRLEMLQQIANRVQRDSVICEDKLILAGNALQSDSKRLESGVQFQNEAEIAGYILECENLLRQHVIDVQILIDGKYYQADQLVQRVAKLRDEIMALRNECSSVYSKGRILTTEQTKLMISGITQSLNSGFAQTLHPSLTSGLTQSLTPSLTSSSMTSGLSSGMTSRLTPSVTPAYTPGFPSGLVPNFSSGVEPNSLQTLKLMQIRKPLLKSSLLDQNLTEEEINMKFVQDLLNWVDEMQVQLDRTEWGSDLPSVESHLENHKNVHRAIEEFESSLKEAKISEIQMTAPLKLTYAEKLHRLESQYAKLLNTSRNQERHLDTLHNFVSRATNELIWLNEKEEEEVAYDWSERNTNIARKKDYHAELMRELDQKEENIKSVQEIAEQLLLENHPARLTIEAYRAAMQTQWSWILQLCQCVEQHIKENTAYFEFFNDAKEATDYLRNLKDAIQRKYSCDRSSSIHKLEDLVQESMEEKEELLQYKSTIANLMGKAKTIIQLKPRNSDCPLKTSIPIKAICDYRQIEITIYKDDECVLANNSHRAKWKVISPTGNEAMVPSVCFTVPPPNKEAVDLANRIEQQYQNVLTLWHESHINMKSVVSWHYLINEIDRIRASNVASIKTMLPGEHQQVLSNLQSRFEDFLEDSQESQVFSGSDITQLEKEVNVCKQYYQELLKSAEREEQEESVYNLYISEVRNIRLRLENCEDRLIRQIRTPLERDDLHESVFRITEQEKLKKELERLKDDLGTITNKCEEFFSQAAASSSVPTLRSELNVVLQNMNQVYSMSSTYIDKLKTVNLVLKNTQAAEALVKLYETKLCEEEAVIADKNNIENLISTLKQWRSEVDEKRQVFHALEDELQKAKAISDEMFKTYKERDLDFDWHKEKADQLVERWQNVHVQIDNRLRDLEGIGKSLKYYRDTYHPLDDWIQQVETTQRKIQENQPENSKTLATQLNQQKMLVSEIEMKQSKMDECQKYAEQYSATVKDYELQTMTYRAMVDSQQKSPVKRRRMQSSADLIIQEFMDLRTRYTALVTLMTQYIKFAGDSLKRLEEEEIKRCKETSEHGAYSDLLQRQKATVLENSKLTGKISELERMVAELKKQKSRVEEELPKVREAAENELRKQQRNVEDISLQKIRAESEAKQYRRELETIVREKEAAERELERVRQLTIEAEAKRAAVEENLLNFRNQLEENTFTRRTLEDHLKRKDLSLNDLEQQKNKLMEELRRKRDNEEELLKLIKQMEKDLAFQKQVAEK

SEQ ID NO: 700 - protein, 73 aa, Homo sapiens
  antigenic epitope recognized by specific TCR for an antigen associated with bullous pemphigoid
EEVRKLKARVDELERIRRSILPYGDSMDRIEKDRLQGMAPAAGADLDKIGLHSDSQEELWMFVRKKLMMEQEN

SEQ ID NO: 701 - protein, 45 aa, Homo sapiens
  antigenic epitope recognized by specific TCR for an antigen associated with bullous pemphigoid
EEVRKLKARVDELERIRRSILPYGDSMDRIEKDRLQGMAPAAGAD

SEQ ID NO: 702 - protein, 14 aa, Homo sapiens
  antigenic epitope recognized by specific TCR for an antigen associated with bullous pemphigoid
RSILPYGDSMDRIE

SEQ ID NO: 703 - protein, 14 aa, Homo sapiens
  antigenic epitope recognized by specific TCR for an antigen associated with bullous pemphigoid
KDRLQGMAPAAGAD

SEQ ID NO: 704 - protein, 78 aa, Homo sapiens
  antigenic epitope recognized by specific TCR for an antigen associated with bullous pemphigoid
AEEVRKLKARVDELERIRRSILPYGDSMDRIEKDRLQGMAPAAGADLDKIGLHSDSQEELWMFVRKKLMMEQENGNLR

SEQ ID NO: 705 - protein, 15 aa, Homo sapiens
  antigenic epitope recognized by specific TCR for an antigen associated with bullous pemphigoid
KARVDELERIRRSIL

SEQ ID NO: 706 - protein, 15 aa, Homo sapiens
  antigenic epitope recognized by specific TCR for an antigen associated with bullous pemphigoid
LERIRRSILPYGDSM

SEQ ID NO: 707 - protein, 15 aa, Homo sapiens
  antigenic epitope recognized by specific TCR for an antigen associated with bullous pemphigoid
IRRSILPYGDSMDRI

SEQ ID NO: 708 - protein, 15 aa, Homo sapiens
  antigenic epitope recognized by specific TCR for an antigen associated with bullous pemphigoid
HSDSQEELWMFVRKK

SEQ ID NO: 709 - protein, 15 aa, Homo sapiens
  antigenic epitope recognized by specific TCR for an antigen associated with bullous pemphigoid
ELWMFVRKKLMMEQE

SEQ ID NO: 710 - protein, 946 aa, Homo sapiens
  antigenic epitope recognized by specific TCR for an antigen associated with bullous pemphigoid
LIALAEEVRKLKARVDELERIRRSILPYGDSMDRIEKDRLQGMAPAAGADLDKIGLHSDSQEELWMFVRKKLMMEQENGNLRGSPGPKGDMGSPGPKGDRGFPGTPGIPGPLGHPGPQGPKGQKGSVGDPGMEGPMGQRGREGPMGPRGEAGPPGSGEKGERGAAGEPGPHGPPGVPGSVGPKGSSGSPGPQGPPGPVGLQGLRGEVGLPGVKGDKGPMGPPGPKGDQGEKGPRGLTGEPGMRGLPGAVGEPGAKGAMGPAGPDGHQGPRGEQGLTGMPGIRGPPGPSGDPGKPGLTGPQGPQGLPGTPGRPGIKGEPGAPGKIVTSEGSSMLTVPGPPGPPGAMGPPGPPGAPGPAGPAGLPGHQEVLNLQGPPGPPGPRGPPGPSIPGPPGPRGPPGEGLPGPPGPPGSFLSNSETFLSGPPGPPGPPGPKGDQGPPGPRGHQGEQGLPGFSTSGSSSFGLNLQGPPGPPGPQGPKGDKGDPGVPGALGIPSGPSEGGSSSTMYVSGPPGPPGPPGPPGSISSSGQEIQQYISEYMQSDSIRSYLSGVQGPPGPPGPPGPVTTITGETFDYSELASHVVSYLRTSGYGVSLFSSSISSEDILAVLQRDDVRQYLRQYLMGPRGPPGPPGASGDGSLLSLDYAELSSRILSYMSSSGISIGLPGPPGPPGLPGTSYEELLSLLRGSEFRGIVGPPGPPGPPGIPGNVWSSISVEDLSSYLHTAGLSFIPGPPGPPGPPGPRGPPGVSGALATYAAENSDSFRSELISYLTSPDVRSFIVGPPGPPGPQGPPGDSRLLSTDASHSRGSSSSSHSSSVRRGSSYSSSMSTGGGGAGSLGAGGAFGEAAGDRGPYGTDIGPGGGYGAAAEGGMYAGNGGLLGADFAGDLDYNELAVRVSESMQRQGLLQGMAYTVQGPPGQPGPQGPPGISKVFSAYSNVTADLMDFF

SEQ ID NO: 711 - protein, 1013 aa, Homo sapiens
  antigenic epitope recognized by specific TCR for an antigen associated with bullous pemphigoid
LIALAEEVRKLKARVDELERIRRSILPYGDSMDRIEKDRLQGMAPAAGADLDKIGLHSDSQEELWMFVRKKLMMEQENGNLRGSPGPKGDMGSPGPKGDRGFPGTPGIPGPLGHPGPQGPKGQKGSVGDPGMEGPMGQRGREGPMGPRGEAGPPGSGEKGERGAAGEPGPHGPPGVPGSVGPKGSSGSPGPQGPPGPVGLQGLRGEVGLPGVKGDKGPMGPPGPKGDQGEKGPRGLTGEPGMRGLPGAVGEPGAKGAMGPAGPDGHQGPRGEQGLTGMPGIRGPPGPSGDPGKPGLTGPQGPQGLPGTPGRPGIKGEPGAPGKIVTSEGSSMLTVPGPPGPPGAMGPPGPPGAPGPAGPAGLPGHQEVLNLQGPPGPPGPRGPPGPSIPGPPGPRGPPGEGLPGPPGPPGSFLSNSETFLSGPPGPPGPPGPKGDQGPPGPRGHQGEQGLPGFSTSGSSSFGLNLQGPPGPPGPQGPKGDKGDPGVPGALGIPSGPSEGGSSSTMYVSGPPGPPGPPGPPGSISSSGQEIQQYISEYMQSDSIRSYLSGVQGPPGPPGPPGPVTTITGETFDYSELASHVVSYLRTSGYGVSLFSSSISSEDILAVLQRDDVRQYLRQYLMGPRGPPGPPGASGDGSLLSLDYAELSSRILSYMSSSGISIGLPGPPGPPGLPGTSYEELLSLLRGSEFRGIVGPPGPPGPPGIPGNVWSSISVEDLSSYLHTAGLSFIPGPPGPPGPPGPRGPPGVSGALATYAAENSDSFRSELISYLTSPDVRSFIVGPPGPPGPQGPPGDSRLLSTDASHSRGSSSSSHSSSVRRGSSYSSSMSTGGGGAGSLGAGGAFGEAAGDRGPYGTDIGPGGGYGAAAEGGMYAGNGGLLGADFAGDLDYNELAVRVSESMQRQGLLQGMAYTVQGPPGQPGPQGPPGISKVFSAYSNVTADLMDFFQTYGAIQGPPGQKGEMGTPGPKGDRGPAGPPGHPGPPGPRGHKGEKGDKGDQVYAGRRRRRSIAVKP

SEQ ID NO: 712 - protein, 323 aa, Homo sapiens
  antigenic epitope recognized by specific TCR for an antigen associated with bullous pemphigoid
EEVRKLKARVDELERIRRSILPYGDSMDRIEKDRLQGMAPAAGADLDKIGLHSDSQEELWMFVRKKLMMEQENGNLRGSPGPKGDMGSPGPKGDRGFPGTPGIPGPLGHPGPQGPKGQKGSVGDPGMEGPMGQRGREGPMGPRGEAGPPGSGEKGERGAAGEPGPHGPPGVPGSVGPKGSSGSPGPQGPPGPVGLQGLRGEVGLPGVKGDKGPMGPPGPKGDQGEKGPRGLTGEPGMRGLPGAVGEPGAKGAMGPAGPDGHQGPRGEQGLTGMPGIRGPPGPSGDPGKPGLTGPQGPQGLPGTPGRPGIKGEPGAPGKIVTSE

SEQ ID NO: 713 - protein, 101 aa, Homo sapiens
  antigenic epitope recognized by specific TCR for an antigen associated with bullous pemphigoid
WLLGLLLTWLLLLGLLFGLIALAEEVRKLKARVDELERIRRSILPYGDSMDRIEKDRLQGMAPAAGADLDKIGLHSDSQEELWMFVRKKLMMEQENGNLRG

SEQ ID NO: 714 - protein, 298 aa, Homo sapiens
  antigenic epitope recognized by specific TCR for an antigen associated with bullous pemphigoid
VTSEGSSMLTVPGPPGPPGAMGPPGPPGAPGPAGPAGLPGHQEVLNLQGPPGPPGPRGPPGPSIPGPPGPRGPPGEGLPGPPGPPGSFLSNSETFLSGPPGPPGPPGPKGDQGPPGPRGHQGEQGLPGFSTSGSSSFGLNLQGPPGPPGPQGPKGDKGDPGVPGALGIPSGPSEGGSSSTMYVSGPPGPPGPPGPPGSISSSGQEIQQYISEYMQSDSIRSYLSGVQGPPGPPGPPGPVTTITGETFDYSELASHVVSYLRTSGYGVSLFSSSISSEDILAVLQRDDVRQYLRQYLMG

SEQ ID NO: 715 - protein, 418 aa, Homo sapiens
  antigenic epitope recognized by specific TCR for an antigen associated with bullous pemphigoid
TTITGETFDYSELASHVVSYLRTSGYGVSLFSSSISSEDILAVLQRDDVRQYLRQYLMGPRGPPGPPGASGDGSLLSLDYAELSSRILSYMSSSGISIGLPGPPGPPGLPGTSYEELLSLLRGSEFRGIVGPPGPPGPPGIPGNVWSSISVEDLSSYLHTAGLSFIPGPPGPPGPPGPRGPPGVSGALATYAAENSDSFRSELISYLTSPDVRSFIVGPPGPPGPQGPPGDSRLLSTDASHSRGSSSSSHSSSVRRGSSYSSSMSTGGGGAGSLGAGGAFGEAAGDRGPYGTDIGPGGGYGAAAEGGMYAGNGGLLGADFAGDLDYNELAVRVSESMQRQGLLQGMAYTVQGPPGQPGPQGPPGISKVFSAYSNVTADLMDFFQTYGAIQGPPGQKGEMGTPGPKGDRGPAGPPGHPG

SEQ ID NO: 716 - protein, 1307 aa, Homo sapiens; identical to SEQ ID NO: 699
  antigenic epitope recognized by specific TCR for an antigen associated with bullous pemphigoid

SEQ ID NO: 717 - protein, 769 aa, Homo sapiens; identical to SEQ ID NO: 697
  antigenic epitope recognized by specific TCR for an antigen associated with bullous pemphigoid

SEQ ID NO: 718 - protein, 573 aa, Homo sapiens; identical to SEQ ID NO: 698
  antigenic epitope recognized by specific TCR for an antigen associated with bullous pemphigoid

SEQ ID NO: 719 - protein, 45 aa, Homo sapiens; identical to SEQ ID NO: 701
  antigenic epitope recognized by specific TCR for an antigen associated with bullous pemphigoid

SEQ ID NO: 720 - protein, 73 aa, Homo sapiens; identical to SEQ ID NO: 700
  antigenic epitope recognized by specific TCR for an antigen associated with bullous pemphigoid

SEQ ID NO: 721 - protein, 14 aa, Homo sapiens
  antigenic epitope recognized by specific TCR for an antigen associated with bullous pemphigoid
SDSQEELWMFVRKK

SEQ ID NO: 722 - protein, 19 aa, Homo sapiens
  antigenic epitope recognized by specific TCR for an antigen associated with bullous pemphigoid
WMFVRKKLMMEQENGNLRG

SEQ ID NO: 723 - protein, 15 aa, Homo sapiens
  antigenic epitope associated with a disorder and recognized by specific TCR".
TNFKYNYSVIEGGPI

SEQ ID NO: 724 - protein, 14 aa, Homo sapiens
  antigenic epitope associated with a disorder and recognized by specific TCR
ILKISNKYHTKGDH

SEQ ID NO: 725 - protein, 16 aa, Homo sapiens
  antigenic epitope associated with a disorder and recognized by specific TCR
DTLEKISNEIKIVATP

SEQ ID NO: 726 - protein, 14 aa, Homo sapiens
  antigenic epitope associated with a disorder and recognized by specific TCR
ILKISNKYHTKGDH

SEQ ID NO: 727 - protein, 14 aa, Homo sapiens
  antigenic epitope associated with a disorder and recognized by specific TCR
ILKISNKYHTKGDH

SEQ ID NO: 728 - protein, 15 aa, Homo sapiens
  antigenic epitope associated with a disorder and recognized by specific TCR
TNFKYNYSVIEGGPI

SEQ ID NO: 729 - protein, 16 aa, Homo sapiens
  antigenic epitope associated with a disorder and recognized by specific TCR
DTLEKISNEIKIVATP

SEQ ID NO: 730 - protein, 16 aa, Homo sapiens
  antigenic epitope associated with a disorder and recognized by specific TCR
DTLEKISNEIKIVATP

SEQ ID NO: 731 - protein, 16 aa, Homo sapiens
  antigenic epitope associated with a disorder and recognized by specific TCR
DTLEKISNEIKIVATP

SEQ ID NO: 732 - protein, 15 aa, Homo sapiens
  antigenic epitope associated with a disorder and recognized by specific TCR
TNFKYNYSVIEGGPI

SEQ ID NO: 733 - protein, 14 aa, Homo sapiens
  antigenic epitope associated with a disorder and recognized by specific TCR
ILKISNKYHTKGDH

SEQ ID NO: 734 - protein, 15 aa, Homo sapiens
  antigenic epitope associated with a disorder and recognized by specific TCR
TNFKYNYSVIEGGPI

SEQ ID NO: 735 - protein, 16 aa, Homo sapiens
  ntigenic epitope associated with a disorder and recognized by specific TCR
DTLEKISNEIKIVATP

SEQ ID NO: 736 - protein, 15 aa, Homo sapiens
  antigenic epitope associated with a disorder and recognized by specific TCR".
TNFKYNYSVIEGGPI

SEQ ID NO: 737 - protein, 14 aa, Homo sapiens
  antigenic epitope associated with a disorder and recognized by specific TCR
ILKISNKYHTKGDH

SEQ ID NO: 738 - protein, 15 aa, Homo sapiens
  antigenic epitope associated with a disorder and recognized by specific TCR
TNFKYNYSVIEGGPI

SEQ ID NO: 739 - protein, 14 aa, Homo sapiens
  antigenic epitope associated with a disorder and recognized by specific TCR
TNFKYNYSVIEGGP

SEQ ID NO: 740 - protein, 11 aa, Homo sapiens
  antigenic epitope associated with a disorder and recognized by specific TCR
PQPELPYPQPE

SEQ ID NO: 741 - protein, 11 aa, Homo sapiens
  antigenic epitope associated with a disorder and recognized by specific TCR
PQPELPYPQPE

SEQ ID NO: 742 - protein, 11 aa, Homo sapiens
  antigenic epitope associated with a disorder and recognized by specific TCR
PQPELPYPQPE

SEQ ID NO: 743 - protein, 11 aa, Homo sapiens
  antigenic epitope associated with a disorder and recognized by specific TCR
PQPELPYPQPE

SEQ ID NO: 744 - protein, 11 aa, Homo sapiens
  antigenic epitope associated with a disorder and recognized by specific TCR
PQPELPYPQPE

SEQ ID NO: 745 - protein, 11 aa, Homo sapiens
  antigenic epitope associated with a disorder and recognized by specific TCR
PQPELPYPQPE

SEQ ID NO: 746 - protein, 11 aa, Homo sapiens
  antigenic epitope associated with a disorder and recognized by specific TCR
PQPELPYPQPE

SEQ ID NO: 747 - protein, 11 aa, Homo sapiens
  antigenic epitope associated with a disorder and recognized by specific TCR
PQPELPYPQPE

SEQ ID NO: 748 - protein, 11 aa, Homo sapiens
  antigenic epitope associated with a disorder and recognized by specific TCR
PQPELPYPQPE

SEQ ID NO: 749 - protein, 11 aa, Homo sapiens
  antigenic epitope associated with a disorder and recognized by specific TCR
PQPELPYPQPE

SEQ ID NO: 750 - protein, 9 aa, Homo sapiens
  antigenic epitope associated with a disorder and recognized by specific TCR
PFPQPELPY

SEQ ID NO: 751 - protein, 9 aa, Homo sapiens
  antigenic epitope associated with a disorder and recognized by specific TCR
PFPQPELPY

SEQ ID NO: 752 - protein, 12 aa, Homo sapiens
  antigenic epitope associated with a disorder and recognized by specific TCR
QLQPFPQPELPY

SEQ ID NO: 753 - protein, 9 aa, Homo sapiens
  antigenic epitope associated with a disorder and recognized by specific TCR
PFPQPELPY

SEQ ID NO: 754 - protein, 9 aa, Homo sapiens
  antigenic epitope associated with a disorder and recognized by specific TCR"
PFPQPELPY

SEQ ID NO: 755 - protein, 9 aa, Homo sapiens
  antigenic epitope associated with a disorder and recognized by specific TCR
PFPQPELPY

SEQ ID NO: 756 - protein, 12 aa, Homo sapiens
  antigenic epitope associated with a disorder and recognized by specific TCR
QLQPFPQPELPY

SEQ ID NO: 757 - protein, 9 aa, Homo sapiens
  antigenic epitope associated with a disorder and recognized by specific TCR
PFPQPELPY

SEQ ID NO: 758 - protein, 9 aa, Homo sapiens
  antigenic epitope associated with a disorder and recognized by specific TCR
PFPQPELPY

SEQ ID NO: 759 - protein, 9 aa, Homo sapiens
  antigenic epitope associated with a disorder and recognized by specific TCR
PFPQPELPY

SEQ ID NO: 760 - protein, 12 aa, Homo sapiens
  antigenic epitope associated with a disorder and recognized by specific TCR
QLQPFPQPELPY

SEQ ID NO: 761 - protein, 9 aa, Homo sapiens
  antigenic epitope associated with a disorder and recognized by specific TCR
PFPQPELPY

SEQ ID NO: 762 - protein, 9 aa, Homo sapiens
  antigenic epitope associated with a disorder and recognized by specific TCR
PFPQPELPY

SEQ ID NO: 763 - protein, 9 aa, Homo sapiens
  antigenic epitope associated with a disorder and recognized by specific TCR
PFPQPELPY

SEQ ID NO: 764 - protein, 9 aa, Homo sapiens
  antigenic epitope associated with a disorder and recognized by specific TCR
PFPQPELPY

SEQ ID NO: 765 - protein, 9 aa, Homo sapiens
  antigenic epitope associated with a disorder and recognized by specific TCR
PFPQPELPY

SEQ ID NO: 766 - protein, 9 aa, Homo sapiens
  antigenic epitope associated with a disorder and recognized by specific TCR
PFPQPELPY

SEQ ID NO: 767 - protein, 9 aa, Homo sapiens
  antigenic epitope associated with a disorder and recognized by specific TCR
PQPELPYPQ

SEQ ID NO: 768 - protein, 9 aa, Homo sapiens
  antigenic epitope associated with a disorder and recognized by specific TCR
PQPELPYPQ

SEQ ID NO: 769 - protein, 9 aa, Homo sapiens
  antigenic epitope associated with a disorder and recognized by specific TCR
PQPELPYPQ

SEQ ID NO: 770 - protein, 9 aa, Homo sapiens
  antigenic epitope associated with a disorder and recognized by specific TCR
PQPELPYPQ

SEQ ID NO: 771 - protein, 9 aa, Homo sapiens
  antigenic epitope associated with a disorder and recognized by specific TCR"
PQPELPYPQ

SEQ ID NO: 772 - protein, 9 aa, Homo sapiens
  antigenic epitope associated with a disorder and recognized by specific TCR
PQPELPYPQ

SEQ ID NO: 773 - protein, 9 aa, Homo sapiens
  antigenic epitope associated with a disorder and recognized by specific TCR
PQPELPYPQ

SEQ ID NO: 774 - protein, 9 aa, Homo sapiens
  antigenic epitope associated with a disorder and recognized by specific TCR
PQPELPYPQ

SEQ ID NO: 775 - protein, 9 aa, Homo sapiens
  antigenic epitope associated with a disorder and recognized by specific TCR
PQPELPYPQ

SEQ ID NO: 776 - protein, 13 aa, Homo sapiens
  antigenic epitope associated with a disorder and recognized by specific TCR
PQQPFPQPEQPFP

SEQ ID NO: 777 - protein, 13 aa, Homo sapiens
  antigenic epitope associated with a disorder and recognized by specific TCR
PQQPFPQPEQPFP

SEQ ID NO: 778 - protein, 13 aa, Homo sapiens
  antigenic epitope associated with a disorder and recognized by specific TCR
PQQPFPQPEQPFP

SEQ ID NO: 779 - protein, 13 aa, Homo sapiens
  antigenic epitope associated with a disorder and recognized by specific TCR
PQQPFPQPEQPFP

SEQ ID NO: 780 - protein, 14 aa, Homo sapiens
  antigenic epitope associated with a disorder and recognized by specific TCR
VHFFKNIVTPRTPG

SEQ ID NO: 781 - protein, 19 aa, Homo sapiens
  antigenic epitope associated with a disorder and recognized by specific TCR
LSRFSWGAEGQRPGFGYGG

SEQ ID NO: 782 - protein, 19 aa, Homo sapiens
  antigenic epitope associated with a disorder and recognized by specific TCR
LSRFSWGAEGQRPGFGYGG

SEQ ID NO: 783 - protein, 19 aa, Homo sapiens
  antigenic epitope associated with a disorder and recognized by specific TCR
LSRFSWGAEGQRPGFGYGG

SEQ ID NO: 784 - protein, 19 aa, Homo sapiens
  antigenic epitope associated with a disorder and recognized by specific TCR
LSRFSWGAEGQRPGFGYGG

SEQ ID NO: 785 - protein, 19 aa, Homo sapiens
  antigenic epitope associated with a disorder and recognized by specific TCR
LSRFSWGAEGQRPGFGYGG

SEQ ID NO: 786 - protein, 19 aa, Homo sapiens
  antigenic epitope associated with a disorder and recognized by specific TCR
LSRFSWGAEGQRPGFGYGG

SEQ ID NO: 787 - protein, 19 aa, Homo sapiens
  antigenic epitope associated with a disorder and recognized by specific TCR
LSRFSWGAEGQRPGFGYGG

SEQ ID NO: 788 - protein, 19 aa, Homo sapiens
  antigenic epitope associated with a disorder and recognized by specific TCR
LSRFSWGAEGQRPGFGYGG

SEQ ID NO: 789 - protein, 19 aa, Homo sapiens
  antigenic epitope associated with a disorder and recognized by specific TCR
LSRFSWGAEGQRPGFGYGG

SEQ ID NO: 790 - protein, 19 aa, Homo sapiens
  antigenic epitope associated with a disorder and recognized by specific TCR
LSRFSWGAEGQRPGFGYGG

SEQ ID NO: 791 - protein, 19 aa, Homo sapiens
  antigenic epitope associated with a disorder and recognized by specific TCR
LSRFSWGAEGQRPGFGYGG

SEQ ID NO: 792 - protein, 19 aa, Homo sapiens
  antigenic epitope associated with a disorder and recognized by specific TCR
LSRFSWGAEGQRPGFGYGG

SEQ ID NO: 793 - protein, 19 aa, Homo sapiens
  antigenic epitope associated with a disorder and recognized by specific TCR
LSRFSWGAEGQRPGFGYGG

SEQ ID NO: 794 - protein, 19 aa, Homo sapiens
  antigenic epitope associated with a disorder and recognized by specific TCR
LSRFSWGAEGQRPGFGYGG

SEQ ID NO: 795 - protein, 19 aa, Homo sapiens
  antigenic epitope associated with a disorder and recognized by specific TCR
LSRFSWGAEGQRPGFGYGG

SEQ ID NO: 796 - protein, 19 aa, Homo sapiens
  antigenic epitope associated with a disorder and recognized by specific TCR
LSRFSWGAEGQRPGFGYGG

SEQ ID NO: 797 - protein, 19 aa, Homo sapiens
  antigenic epitope associated with a disorder and recognized by specific TCR
LSRFSWGAEGQRPGFGYGG

SEQ ID NO: 798 - protein, 19 aa, Homo sapiens
  antigenic epitope associated with a disorder and recognized by specific TCR
LSRFSWGAEGQRPGFGYGG

SEQ ID NO: 799 - protein, 19 aa, Homo sapiens
  antigenic epitope associated with a disorder and recognized by specific TCR
LSRFSWGAEGQRPGFGYGG

SEQ ID NO: 800 - protein, 19 aa, Homo sapiens
  antigenic epitope associated with a disorder and recognized by specific TCR
LSRFSWGAEGQRPGFGYGG

SEQ ID NO: 801 - protein, 19 aa, Homo sapiens
  antigenic epitope associated with a disorder and recognized by specific TCR
LSRFSWGAEGQRPGFGYGG

SEQ ID NO: 802 - protein, 15 aa, Homo sapiens
  antigenic epitope associated with a disorder and recognized by specific TCR
EKPKVEAYKAAAAPA

SEQ ID NO: 803 - protein, 15 aa, Homo sapiens
  antigenic epitope associated with a disorder and recognized by specific TCR
EKPKVEAYKAAAAPA

SEQ ID NO: 804 - protein, 15 aa, Homo sapiens
  antigenic epitope associated with a disorder and recognized by specific TCR
EKPKVEAYKAAAAPA

SEQ ID NO: 805 - protein, 15 aa, Homo sapiens
  antigenic epitope associated with a disorder and recognized by specific TCR
EKPKVEAYKAAAAPA

SEQ ID NO: 806 - protein, 15 aa, Homo sapiens
  antigenic epitope associated with a disorder and recognized by specific TCR
EKPKVEAYKAAAAPA

SEQ ID NO: 807 - protein, 15 aa, Homo sapiens
  antigenic epitope associated with a disorder and recognized by specific TC
EKPKVEAYKAAAAPA

SEQ ID NO: 808 - protein, 43 aa, Homo sapiens
  antigenic epitope associated with a disorder and recognized by specific TCR
EKPKVEAYKAAAAPAEKPKVEAYKAAAAPAPKVEAYKAAAAPA

SEQ ID NO: 809 - protein, 14 aa, Homo sapiens
  antigenic epitope associated with a disorder and recognized by specific TCR
TVYGAFDPLLAVAD

SEQ ID NO: 810 - protein, 13 aa, Homo sapiens
  antigenic epitope associated with a disorder and recognized by specific TCR
NFFRMVISNPAAT

SEQ ID NO: 811 - protein, 13 aa, Homo sapiens
  antigenic epitope associated with a disorder and recognized by specific TCR
NFFRMVISNPAAT

SEQ ID NO: 812 - protein, 20 aa, Homo sapiens
  antigenic epitope associated with a disorder and recognized by specific TCR
QLYHFLQIPTHEEHLFYVLS

SEQ ID NO: 813 - protein, 20 aa, Homo sapiens
  antigenic epitope associated with a disorder and recognized by specific TCR
KWCANPDWIHIDTTPFAGLV

SEQ ID NO: 814 - protein, 15 aa, Homo sapiens
  antigenic epitope associated with a disorder and recognized by specific TCR
SHLVEALYLVCGERG

SEQ ID NO: 815 - protein, 7 aa, Homo sapiens
  antigenic epitope associated with a disorder and recognized by specific TCR
LALEGSL

SEQ ID NO: 816 - protein, 7 aa, Homo sapiens
  antigenic epitope associated with a disorder and recognized by specific TCR
LALEGSL

SEQ ID NO: 817 - protein, 10 aa, Homo sapiens
  antigenic epitope associated with a disorder and recognized by specific TCR
AEDLQVGQVE

SEQ ID NO: 818 - protein, 10 aa, Homo sapiens
  antigenic epitope associated with a disorder and recognized by specific TCR
AEDLQVGQVE

SEQ ID NO: 819 - protein, 18 aa, Homo sapiens
  antigenic epitope associated with a disorder and recognized by specific TCR
GSLQPLALEGSLQKRGIV

SEQ ID NO: 820 - protein, 18 aa, Homo sapiens
  antigenic epitope associated with a disorder and recognized by specific TCR
GSLQPLALEGSLQKRGIV

SEQ ID NO: 821 - protein, 18 aa, Homo sapiens
  antigenic epitope associated with a disorder and recognized by specific TCR
GSLQPLALEGSLQKRGIV

SEQ ID NO: 822 - protein, 18 aa, Homo sapiens
  antigenic epitope associated with a disorder and recognized by specific TCR
GSLQPLALEGSLQKRGIV

SEQ ID NO: 823 - protein, 18 aa, Homo sapiens
  antigenic epitope associated with a disorder and recognized by specific TCR
GSLQPLALEGSLQKRGIV

SEQ ID NO: 824 - protein, 10 aa, Homo sapiens
  antigenic epitope associated with a disorder and recognized by specific TCR
AGSLQPLALE

SEQ ID NO: 825 - protein, 18 aa, Homo sapiens
  antigenic epitope associated with a disorder and recognized by specific TCR
GSLQPLALEGSLQKRGIV

SEQ ID NO: 826 - protein, 15 aa, Homo sapiens
  antigenic epitope associated with a disorder and recognized by specific TCR
SHLVEALYLVCGERG

SEQ ID NO: 827 - protein, 11 aa, Homo sapiens
  antigenic epitope associated with a disorder and recognized by specific TCR
QVELGGGPGAG

SEQ ID NO: 828 - protein, 18 aa, Homo sapiens
  antigenic epitope associated with a disorder and recognized by specific TCR
GSLQPLALEGSLQKRGIV

SEQ ID NO: 829 - protein, 10 aa, Homo sapiens
  antigenic epitope associated with a disorder and recognized by specific TCR
SLQPLALEGS

SEQ ID NO: 830 - protein, 10 aa, Homo sapiens
  antigenic epitope associated with a disorder and recognized by specific TCR
SLQPLALEGS

SEQ ID NO: 831 - protein, 10 aa, Homo sapiens
  antigenic epitope associated with a disorder and recognized by specific TCR
SLQPLALEGS

SEQ ID NO: 832 - protein, 18 aa, Homo sapiens
  antigenic epitope associated with a disorder and recognized by specific TCR"
GSLQPLALEGSLQKRGIV

SEQ ID NO: 833 - protein, 15 aa, Homo sapiens
  antigenic epitope associated with a disorder and recognized by specific TCR
SHLVEALYLVCGERG

SEQ ID NO: 834 - protein, 15 aa, Homo sapiens
  antigenic epitope associated with a disorder and recognized by specific TCR
SHLVEALYLVCGERG

SEQ ID NO: 835 - protein, 11 aa, Homo sapiens
  antigenic epitope associated with a disorder and recognized by specific TCR
SLQPLALEGSL

SEQ ID NO: 836 - protein, 18 aa, Homo sapiens
  antigenic epitope associated with a disorder and recognized by specific TCR
GSLQPLALEGSLQKRGIV

SEQ ID NO: 837 - protein, 17 aa, Homo sapiens
  antigenic epitope associated with a disorder and recognized by specific TCR
GAGSLQPLALEGSLQKR

SEQ ID NO: 838 - protein, 9 aa, Homo sapiens
  antigenic epitope associated with a disorder and recognized by specific TCR
AGSLQPLAL

SEQ ID NO: 839 - protein, 15 aa, Homo sapiens
  antigenic epitope associated with a disorder and recognized by specific TCR
SHLVEALYLVCGERG

SEQ ID NO: 840 - protein, 18 aa, Homo sapiens
  antigenic epitope associated with a disorder and recognized by specific TCR
GSLQPLALEGSLQKRGIV

SEQ ID NO: 841 - protein, 9 aa, Homo sapiens
  antigenic epitope associated with a disorder and recognized by specific TCR
VELGGGPGA

SEQ ID NO: 842 - protein, 9 aa, Homo sapiens
  antigenic epitope associated with a disorder and recognized by specific TCR
QPLALEGSL

SEQ ID NO: 843 - protein, 9 aa, Homo sapiens
  antigenic epitope associated with a disorder and recognized by specific TCR"
QPLALEGSL

SEQ ID NO: 844 - protein, 18 aa, Homo sapiens
  antigenic epitope associated with a disorder and recognized by specific TCR
GSLQPLALEGSLQKRGIV

SEQ ID NO: 845 - protein, 10 aa, Homo sapiens
  antigenic epitope associated with a disorder and recognized by specific TCR
GAGSLQPLAL

SEQ ID NO: 846 - protein, 18 aa, Homo sapiens
  antigenic epitope associated with a disorder and recognized by specific TCR
GSLQPLALEGSLQKRGIV

SEQ ID NO: 847 - protein, 9 aa, Homo sapiens
  antigenic epitope associated with a disorder and recognized by specific TCR
QPLALEGSL

SEQ ID NO: 848 - protein, 9 aa, Homo sapiens
  antigenic epitope associated with a disorder and recognized by specific TCR
VELGGGPGA

SEQ ID NO: 849 - protein, 15 aa, Homo sapiens
  antigenic epitope associated with a disorder and recognized by specific TCR
SHLVEALYLVCGERG

SEQ ID NO: 850 - protein, 9 aa, Homo sapiens
  antigenic epitope associated with a disorder and recognized by specific TCR
QVELGGGPG

SEQ ID NO: 851 - protein, 11 aa, Homo sapiens
  antigenic epitope associated with a disorder and recognized by specific TCR
QVELGGGPGAG

SEQ ID NO: 852 - protein, 15 aa, Homo sapiens
  antigenic epitope associated with a disorder and recognized by specific TCR
GIVEQCCTSICSLYQ

SEQ ID NO: 853 - protein, 10 aa, Homo sapiens
  antigenic epitope associated with a disorder and recognized by specific TCR
VELGGGPGAG

SEQ ID NO: 854 - protein, 9 aa, Homo sapiens
  antigenic epitope associated with a disorder and recognized by specific TCR
VELGGGPGA

SEQ ID NO: 855 - protein, 18 aa, Homo sapiens
  antigenic epitope associated with a disorder and recognized by specific TCR
GSLQPLALEGSLQKRGIV

SEQ ID NO: 856 - protein, 10 aa, Homo sapiens
  antigenic epitope associated with a disorder and recognized by specific TCR
LVEALYLVCG

SEQ ID NO: 857 - protein, 19 aa, Homo sapiens
  antigenic epitope associated with a disorder and recognized by specific TCR
PGAGSLQPLALEGSLQKRG

SEQ ID NO: 858 - protein, 12 aa, Homo sapiens
  antigenic epitope associated with a disorder and recognized by specific TCR
EDLQVGQVELGG

SEQ ID NO: 859 - protein, 12 aa, Homo sapiens
  antigenic epitope associated with a disorder and recognized by specific TCR
PGAGSLQPLALE

SEQ ID NO: 860 - protein, 9 aa, Homo sapiens
  antigenic epitope associated with a disorder and recognized by specific TCR
AGSLQPLAL

SEQ ID NO: 861 - protein, 9 aa, Homo sapiens
  antigenic epitope associated with a disorder and recognized by specific TCR
AGSLQPLAL

SEQ ID NO: 862 - protein, 9 aa, Homo sapiens
  antigenic epitope associated with a disorder and recognized by specific TCR
AGSLQPLAL

SEQ ID NO: 863 - protein, 18 aa, Homo sapiens
  antigenic epitope associated with a disorder and recognized by specific TCR
GSLQPLALEGSLQKRGIV

SEQ ID NO: 864 - protein, 12 aa, Homo sapiens
  antigenic epitope associated with a disorder and recognized by specific TCR
SLQPLALEGSLQ

SEQ ID NO: 865 - protein, 10 aa, Homo sapiens
  antigenic epitope associated with a disorder and recognized by specific TCR
QPLALEGSLQ

SEQ ID NO: 866 - protein, 10 aa, Homo sapiens
  antigenic epitope associated with a disorder and recognized by specific TCR
QPLALEGSLQ

SEQ ID NO: 867 - protein, 15 aa, Homo sapiens
  antigenic epitope associated with a disorder and recognized by specific TCR
MALWMRLLPLLALLA

SEQ ID NO: 868 - protein, 15 aa, Homo sapiens
  antigenic epitope associated with a disorder and recognized by specific TCR
MALWMRLLPLLALLA

SEQ ID NO: 869 - protein, 15 aa, Homo sapiens
  antigenic epitope associated with a disorder and recognized by specific TCR
MALWMRLLPLLALLA

SEQ ID NO: 870 - protein, 15 aa, Homo sapiens
  antigenic epitope associated with a disorder and recognized by specific TCR
MALWMRLLPLLALLA

SEQ ID NO: 871 - protein, 15 aa, Homo sapiens
  CDR3 alpha of TCR that specifically recognizes antigen associated with a disorder
CAAKTGYSSASKIIF

SEQ ID NO: 872 - protein, 15 aa, Homo sapiens
  CDR3 alpha of TCR that specifically recognizes antigen associated with a disorder
CAASMGLNSGYALNF

SEQ ID NO: 873 - protein, 15 aa, Homo sapiens
  CDR3 alpha of TCR that specifically recognizes antigen associated with a disorder
CAASRKDRTASKLTF

SEQ ID NO: 874 - protein, 14 aa, Homo sapiens
  CDR3 alpha of TCR that specifically recognizes antigen associated with a disorder
CAEMMNSGYSTLTF

SEQ ID NO: 875 - protein, 17 aa, Homo sapiens
  CDR3 alpha of TCR that specifically recognizes antigen associated with a disorder
CAENRGAGGTSYGKLTF

SEQ ID NO: 876 - protein, 19 aa, Homo sapiens
  CDR3 alpha of TCR that specifically recognizes antigen associated with a disorder
CALESLLLIKETSGSRLTF

SEQ ID NO: 877 - protein, 13 aa, Homo sapiens
  CDR3 alpha of TCR that specifically recognizes antigen associated with a disorder
CALRVYNFNKFYF

SEQ ID NO: 878 - protein, 15 aa, Homo sapiens
  CDR3 alpha of TCR that specifically recognizes antigen associated with a disorder
CALSPLNQAGTALIF

SEQ ID NO: 879 - protein, 15 aa, Homo sapiens
  CDR3 alpha of TCR that specifically recognizes antigen associated with a disorder
CALSPLNQAGTALIF

SEQ ID NO: 880 - protein, 13 aa, Homo sapiens
  CDR3 alpha of TCR that specifically recognizes antigen associated with a disorder
CAMGETGGPKTIF

SEQ ID NO: 881 - protein, 17 aa, Homo sapiens
  CDR3 alpha of TCR that specifically recognizes antigen associated with a disorder
CAMRDLYSGAGSYQLTF

SEQ ID NO: 882 - protein, 17 aa, Homo sapiens
  CDR3 alpha of TCR that specifically recognizes antigen associated with a disorder
CAPPPRAGGTSYGKLTF

SEQ ID NO: 883 - protein, 17 aa, Homo sapiens
  CDR3 alpha of TCR that specifically recognizes antigen associated with a disorder
CAVNIVGTQGGSEKLVF

SEQ ID NO: 884 - protein, 12 aa, Homo sapiens
  CDR3 alpha of TCR that specifically recognizes antigen associated with a disorder
CAVNTGFQKLVF

SEQ ID NO: 885 - protein, 13 aa, Homo sapiens
  CDR3 alpha of TCR that specifically recognizes antigen associated with a disorder
CAVPVYNTDKLIF

SEQ ID NO: 886 - protein, 13 aa, Homo sapiens
  CDR3 alpha of TCR that specifically recognizes antigen associated with a disorder
CAVRGGGADGLTF

SEQ ID NO: 887 - protein, 19 aa, Homo sapiens
  CDR3 alpha of TCR that specifically recognizes antigen associated with a disorder
CAADEFVRNYGGATNKLIF

SEQ ID NO: 888 - protein, 10 aa, Homo sapiens
  :  CDR3 alpha of TCR that specifically recognizes antigen associated with a disorder
CAGDSGYALN

SEQ ID NO: 889 - protein, 15 aa, Homo sapiens
  CDR3 alpha of TCR that specifically recognizes antigen associated with a disorder
CALSELSIQGAQKLV

SEQ ID NO: 890 - protein, 13 aa, Homo sapiens
  CDR3 alpha of TCR that specifically recognizes antigen associated with a disorder
CALSESGANSKLT

SEQ ID NO: 891 - protein, 14 aa, Homo sapiens
  CDR3 alpha of TCR that specifically recognizes antigen associated with a disorder
CAVRDPLYNFNKFY

SEQ ID NO: 892 - protein, 10 aa, Homo sapiens
  CDR3 alpha of TCR that specifically recognizes antigen associated with a disorder
CIEYNFNKFY

SEQ ID NO: 893 - protein, 13 aa, Homo sapiens
  CDR3 alpha of TCR that specifically recognizes antigen associated with a disorder
CIVPANTGGFKTI

SEQ ID NO: 894 - protein, 11 aa, Homo sapiens
  CDR3 alpha of TCR that specifically recognizes antigen associated with a disorder
CLVGGGADGLT

SEQ ID NO: 895 - protein, 14 aa, Homo sapiens
  CDR3 alpha of TCR that specifically recognizes antigen associated with a disorder
CLVGHGSSNTGKLI

SEQ ID NO: 896 - protein, 12 aa, Homo sapiens
  :  CDR3 alpha of TCR that specifically recognizes antigen associated with a disorder
CVVNSWAGNQFY

SEQ ID NO: 897 - protein, 9 aa, Homo sapiens
  CDR3 alpha of TCR that specifically recognizes antigen associated with a disorder
IVYGGFKTI

SEQ ID NO: 898 - protein, 13 aa, Homo sapiens
  CDR3 alpha of TCR that specifically recognizes antigen associated with a disorder
CAAPGGATNKLIF

SEQ ID NO: 899 - protein, 16 aa, Homo sapiens
  CDR3 alpha of TCR that specifically recognizes antigen associated with a disorder
CAASANYGGATNKLIF

SEQ ID NO: 900 - skipped

SEQ ID NO: 901 - protein, 13 aa, Homo sapiens
  CDR3 alpha of TCR that specifically recognizes antigen associated with a disorder
CAFIGGSNYKLTF

SEQ ID NO: 902 - protein, 13 aa, Homo sapiens
  CDR3 alpha of TCR that specifically recognizes antigen associated with a disorder
CAGPSGATNKLIF

SEQ ID NO: 903 - protein, 12 aa, Homo sapiens
  CDR3 alpha of TCR that specifically recognizes antigen associated with a disorder
CAGPYNTDKLIF

SEQ ID NO: 904 - protein, 15 aa, Homo sapiens
  CDR3 alpha of TCR that specifically recognizes antigen associated with a disorder
CAMREGWQAGNTLIF

SEQ ID NO: 905 - protein, 14 aa, Homo sapiens
  CDR3 alpha of TCR that specifically recognizes antigen associated with a disorder
CAVELGDSWGKFQF

SEQ ID NO: 906 - protein, 13 aa, Homo sapiens
  CDR3 alpha of TCR that specifically recognizes antigen associated with a disorder
CAVGAGSNYQLIW

SEQ ID NO: 907 - protein, 15 aa, Homo sapiens
  CDR3 alpha of TCR that specifically recognizes antigen associated with a disorder
CAVGWEDGTASKLTF

SEQ ID NO: 908 - protein, 14 aa, Homo sapiens
  CDR3 alpha of TCR that specifically recognizes antigen associated with a disorder
CAVKFASGTYKYIF

SEQ ID NO: 909 - protein, 14 aa, Homo sapiens
  CDR3 alpha of TCR that specifically recognizes antigen associated with a disorder
CAVQADGNTGKLIF

SEQ ID NO: 910 - protein, 14 aa, Homo sapiens
  CDR3 alpha of TCR that specifically recognizes antigen associated with a disorder
CAVTLGGGSEKLVF

SEQ ID NO: 911 - protein, 15 aa, Homo sapiens
  CDR3 alpha of TCR that specifically recognizes antigen associated with a disorder
CAYRSGYMEYGNKLV

SEQ ID NO: 912 - protein, 14 aa, Homo sapiens
  CDR3 alpha of TCR that specifically recognizes antigen associated with a disorder
CLVAGAGGYNKLIF

SEQ ID NO: 913 - protein, 18 aa, Homo sapiens
  CDR3 alpha of TCR that specifically recognizes antigen associated with a disorder
CLVGDGGSFSGGYNKLIF

SEQ ID NO: 914 - protein, 12 aa, Homo sapiens
  CDR3 alpha of TCR that specifically recognizes antigen associated with a disorder
CLVGDNDYKLSF

SEQ ID NO: 915 - protein, 16 aa, Homo sapiens
  CDR3 alpha of TCR that specifically recognizes antigen associated with a disorder
CAMREGRGAGSYQLTF

SEQ ID NO: 916 - protein, 16 aa, Homo sapiens
  CDR3 alpha of TCR that specifically recognizes antigen associated with a disorder
CAMREGRGAGSYQLTF

SEQ ID NO: 917 - protein, 14 aa, Homo sapiens
  CDR3 alpha of TCR that specifically recognizes antigen associated with a disorder
CAMSVLSGTYKYIF

SEQ ID NO: 918 - protein, 14 aa, Homo sapiens
  CDR3 alpha of TCR that specifically recognizes antigen associated with a disorder
CAMSVLSGTYKYIF

SEQ ID NO: 919 - protein, 14 aa, Homo sapiens
  CDR3 alpha of TCR that specifically recognizes antigen associated with a disorder
CAVGRGGSQGNLIF

SEQ ID NO: 920 - protein, 12 aa, Homo sapiens
  CDR3 alpha of TCR that specifically recognizes antigen associated with a disorder
CIAFQGAQKLVF

SEQ ID NO: 921 - protein, 12 aa, Homo sapiens
  CDR3 alpha of TCR that specifically recognizes antigen associated with a disorder
CIVLGGADGLTF

SEQ ID NO: 922 - protein, 13 aa, Homo sapiens
  CDR3 alpha of TCR that specifically recognizes antigen associated with a disorder
CIVWGGATNKLIF

SEQ ID NO: 923 - protein, 13 aa, Homo sapiens
  CDR3 alpha of TCR that specifically recognizes antigen associated with a disorder
CLVGEAAGNKLTF

SEQ ID NO: 924 - protein, 14 aa, Homo sapiens
  CDR3 alpha of TCR that specifically recognizes antigen associated with a disorder
CAESRYSGYSTLTF

SEQ ID NO: 925 - protein, 12 aa, Homo sapiens
  CDR3 alpha of TCR that specifically recognizes antigen associated with a disorder
CALSEYGNKLVF

SEQ ID NO: 926 - protein, 12 aa, Homo sapiens
  CDR3 alpha of TCR that specifically recognizes antigen associated with a disorder
CAVVDASSKLIF

SEQ ID NO: 927 - protein, 13 aa, Homo sapiens
  CDR3 alpha of TCR that specifically recognizes antigen associated with a disorder
CLVGGYNNNDMRF

SEQ ID NO: 928 - protein, 14 aa, Homo sapiens
  CDR3 alpha of TCR that specifically recognizes antigen associated with a disorder
CALSGGDSSYKLIF

SEQ ID NO: 929 - protein, 23 aa, Homo sapiens
  CDR3 alpha of TCR that specifically recognizes antigen associated with a disorder
FCAEAQKGQKLLFARGTMLKVDL

SEQ ID NO: 930 - protein, 27 aa, Homo sapiens
  CDR3 alpha of TCR that specifically recognizes antigen associated with a disorder
FCAVISISSGSARQLTFGSGTQLTVLP

SEQ ID NO: 931 - protein, 21 aa, Homo sapiens
  CDR3 alpha of TCR that specifically recognizes antigen associated with a disorder
FCAVMHNDMRFGAGTRLTVKP

SEQ ID NO: 932 - skipped

SEQ ID NO: 933 - protein, 25 aa, Homo sapiens
  CDR3 alpha of TCR that specifically recognizes antigen associated with a disorder
LCAAYGSSNTGKLIFGQGTTLQVKP

SEQ ID NO: 934 - protein, 25 aa, Homo sapiens
  CDR3 alpha of TCR that specifically recognizes antigen associated with a disorder
LCAVQANNYGQNFVFGPGTRLSVLP

SEQ ID NO: 935 - protein, 25 aa, Homo sapiens
  CDR3 alpha of TCR that specifically recognizes antigen associated with a disorder
LCAVQANNYGQNFVFGPGTRLSVLP

SEQ ID NO: 936 - protein, 25 aa, Homo sapiens
  CDR3 alpha of TCR that specifically recognizes antigen associated with a disorder
LCAVQANNYGQNFVFGPGTRLSVLP

SEQ ID NO: 937 - protein, 25 aa, Homo sapiens
  CDR3 alpha of TCR that specifically recognizes antigen associated with a disorder
LCAVQGAGGYQKVTFGIGTKLQVIP

SEQ ID NO: 938 - protein, 25 aa, Homo sapiens
  CDR3 alpha of TCR that specifically recognizes antigen associated with a disorder
LCAVRKETSGSRLTFGEGTQLTVNP

SEQ ID NO: 939 - protein, 24 aa, Homo sapiens
  CDR3 alpha of TCR that specifically recognizes antigen associated with a disorder
LCAVYTGANSKLTFGKGITLSVRP

SEQ ID NO: 940 - protein, 2 aa, Homo sapiens
  CDR3 alpha of TCR that specifically recognizes antigen associated with a disorder
ND

SEQ ID NO: 941 - protein, 25 aa, Homo sapiens
  CDR3 alpha of TCR that specifically recognizes antigen associated with a disorder
YCILRGRTSYDKVIFGPGTSLSVIP

SEQ ID NO: 942 - protein, 25 aa, Homo sapiens
  CDR3 alpha of TCR that specifically recognizes antigen associated with a disorder
YCILRGRTSYDKVIFGPGTSLSVIP

SEQ ID NO: 943 - protein, 25 aa, Homo sapiens
  CDR3 alpha of TCR that specifically recognizes antigen associated with a disorder
YCILRGRTSYDKVIFGPGTSLSVIP

SEQ ID NO: 944 - protein, 27 aa, Homo sapiens
  CDR3 alpha of TCR that specifically recognizes antigen associated with a disorder
YCIVRPSHNTNAGKSTFGDGTTLTVKP

SEQ ID NO: 945 - protein, 25 aa, Homo sapiens
  CDR3 alpha of TCR that specifically recognizes antigen associated with a disorder
YCIVRVVDYGQNFVFGPGTRLSVLP

SEQ ID NO: 946 - protein, 24 aa, Homo sapiens
  CDR3 alpha of TCR that specifically recognizes antigen associated with a disorder
YCTVYGGATNKLIFGTGTLLAVQP

SEQ ID NO: 947 - protein, 24 aa, Homo sapiens
  CDR3 alpha of TCR that specifically recognizes antigen associated with a disorder
YCTVYGGATNKLIFGTGTLLAVQP

SEQ ID NO: 948 - protein, 24 aa, Homo sapiens
  CDR3 alpha of TCR that specifically recognizes antigen associated with a disorder
YCTVYGGATNKLIFGTGTLLAVQP

SEQ ID NO: 949 - protein, 24 aa, Homo sapiens
  CDR3 alpha of TCR that specifically recognizes antigen associated with a disorder
YCTVYGGATNKLIFGTGTLLAVQP

SEQ ID NO: 950 - protein, 29 aa, Homo sapiens
  CDR3 alpha of TCR that specifically recognizes antigen associated with a disorder
YFCAASSFGNEKLTFGTGTRLTIIPNIQN

SEQ ID NO: 951 - protein, 28 aa, Homo sapiens
  CDR3 alpha of TCR that specifically recognizes antigen associated with a disorder
YFCATDAGGQNFVFGPGTRLSVLPYIQN

SEQ ID NO: 952 - protein, 30 aa, Homo sapiens [sequence omitted]

SEQ ID NO: 953 - protein, 28 aa, Homo sapiens
  CDR3 alpha of TCR that specifically recognizes antigen associated with a disorder
YFCATDGNGNQFYFGTGTSLTVIPNIQN

SEQ ID NO: 954 - protein, 29 aa, Homo sapiens
  CDR3 alpha of TCR that specifically recognizes antigen associated with a disorder
YFCATDSGGSYIPTFGRGTSLIVHPYIQN

SEQ ID NO: 955 - protein, 29 aa, Homo sapiens [sequence omitted]

SEQ ID NO: 956 - protein, 30 aa, Homo sapiens
  CDR3 alpha of TCR that specifically recognizes antigen associated with a disorder
YFCATDTTSGTYKYIFGTGTRLKVLANIQN

SEQ ID NO: 957 - protein, 15 aa, Homo sapiens
  CDR3 alpha of TCR that specifically recognizes antigen associated with a disorder
CAGHSIIQGAQKLVF

SEQ ID NO: 958 - protein, 15 aa, Homo sapiens
  CDR3 alpha of TCR that specifically recognizes antigen associated with a disorder
CALSEEGGGANSKLT

SEQ ID NO: 959 - protein, 15 aa, Homo sapiens
  CDR3 alpha of TCR that specifically recognizes antigen associated with a disorder
CALSENRGGTASKLT

SEQ ID NO: 960 - protein, 14 aa, Homo sapiens
  CDR3 alpha of TCR that specifically recognizes antigen associated with a disorder
CAATRTSGTYKYIF

SEQ ID NO: 961 - protein, 15 aa, Homo sapiens
  CDR3 alpha of TCR that specifically recognizes antigen associated with a disorder
CAVEDLNQAGTALIF

SEQ ID NO: 962 - protein, 12 aa, Homo sapiens
  CDR3 alpha of TCR that specifically recognizes antigen associated with a disorder
AASKASNTGKLI

SEQ ID NO: 963 - protein, 15 aa, Homo sapiens
  CDR3 alpha of TCR that specifically recognizes antigen associated with a disorder
CAAALSGAGSYQLTF

SEQ ID NO: 964 - protein, 15 aa, Homo sapiens
  CDR3 alpha of TCR that specifically recognizes antigen associated with a disorder
CAAALSGAGSYQLTF

SEQ ID NO: 965 - protein, 14 aa, Homo sapiens
  CDR3 alpha of TCR that specifically recognizes antigen associated with a disorder
CAARNAGNNRKLIW

SEQ ID NO: 966 - protein, 14 aa, Homo sapiens
  CDR3 alpha of TCR that specifically recognizes antigen associated with a disorder
CAARNAGNNRKLIW

SEQ ID NO: 967 - protein, 17 aa, Homo sapiens
  CDR3 alpha of TCR that specifically recognizes antigen associated with a disorder
CAASSSAGGTSYGKLTF

SEQ ID NO: 968 - protein, 15 aa, Homo sapiens
  CDR3 alpha of TCR that specifically recognizes antigen associated with a disorder
CAASVSGGSNYKLTF

SEQ ID NO: 969 - protein, 17 aa, Homo sapiens
  CDR3 alpha of TCR that specifically recognizes antigen associated with a disorder
CAASVYAGGTSYGKLTF

SEQ ID NO: 970 - protein, 12 aa, Homo sapiens
  CDR3 alpha of TCR that specifically recognizes antigen associated with a disorder
CAENNQGGKLIF

SEQ ID NO: 971 - protein, 15 aa, Homo sapiens
  CDR3 alpha of TCR that specifically recognizes antigen associated with a disorder
CAESPNAGNNRKLIW

SEQ ID NO: 972 - protein, 13 aa, Homo sapiens
  CDR3 alpha of TCR that specifically recognizes antigen associated with a disorder
CAGGFSDGQKLLF

SEQ ID NO: 973 - protein, 16 aa, Homo sapiens
  CDR3 alpha of TCR that specifically recognizes antigen associated with a disorder
CAGGPRRGSTLGRLYF

SEQ ID NO: 974 - protein, 13 aa, Homo sapiens
  CDR3 alpha of TCR that specifically recognizes antigen associated with a disorder
CAILSGGYNKLIF

SEQ ID NO: 975 - protein, 12 aa, Homo sapiens
  CDR3 alpha of TCR that specifically recognizes antigen associated with a disorder
CALKYGANNLFF

SEQ ID NO: 976 - protein, 13 aa, Homo sapiens
  CDR3 alpha of TCR that specifically recognizes antigen associated with a disorder
CALRNQGAQKLVF

SEQ ID NO: 977 - protein, 13 aa, Homo sapiens
  CDR3 alpha of TCR that specifically recognizes antigen associated with a disorder
CALSGRGSEKLVF

SEQ ID NO: 978 - protein, 13 aa, Homo sapiens
  CDR3 alpha of TCR that specifically recognizes antigen associated with a disorder
CALSGRGSEKLVF

SEQ ID NO: 979 - protein, 14 aa, Homo sapiens
  CDR3 alpha of TCR that specifically recognizes antigen associated with a disorder
CALSRAGTGNQFYF

SEQ ID NO: 980 - protein, 11 aa, Homo sapiens
  CDR3 alpha of TCR that specifically recognizes antigen associated with a disorder
CALYNNNDMRF

SEQ ID NO: 981 - protein, 11 aa, Homo sapiens
  CDR3 alpha of TCR that specifically recognizes antigen associated with a disorder
CATAYGQNFVF

SEQ ID NO: 982 - protein, 15 aa, Homo sapiens
  CDR3 alpha of TCR that specifically recognizes antigen associated with a disorder
CATDAGYNQGGKLIF

SEQ ID NO: 983 - protein, 14 aa, Homo sapiens
  CDR3 alpha of TCR that specifically recognizes antigen associated with a disorder
CATGPIQGAQKLVF

SEQ ID NO: 984 - protein, 12 aa, Homo sapiens
  CDR3 alpha of TCR that specifically recognizes antigen associated with a disorder
CATYNQGGKLIF

SEQ ID NO: 985 - protein, 14 aa, Homo sapiens
  CDR3 alpha of TCR that specifically recognizes antigen associated with a disorder
CAVDGSGNTGKLIF

SEQ ID NO: 986 - protein, 13 aa, Homo sapiens
  CDR3 alpha of TCR that specifically recognizes antigen associated with a disorder
CAVIETSGSRLTF

SEQ ID NO: 987 - protein, 14 aa, Homo sapiens
  CDR3 alpha of TCR that specifically recognizes antigen associated with a disorder
CAVKRTGGSYIPTF

SEQ ID NO: 988 - protein, 11 aa, Homo sapiens
  CDR3 alpha of TCR that specifically recognizes antigen associated with a disorder
CAVPNNNDMRF

SEQ ID NO: 989 - protein, 13 aa, Homo sapiens
  CDR3 alpha of TCR that specifically recognizes antigen associated with a disorder
CAVQAGGNNRLAF

SEQ ID NO: 990 - protein, 13 aa, Homo sapiens
  CDR3 alpha of TCR that specifically recognizes antigen associated with a disorder
CAVRGDNNARLMF

SEQ ID NO: 991 - protein, 13 aa, Homo sapiens
  CDR3 alpha of TCR that specifically recognizes antigen associated with a disorder
CAVRGDNNARLMF

SEQ ID NO: 992 - protein, 14 aa, Homo sapiens
  CDR3 alpha of TCR that specifically recognizes antigen associated with a disorder
CAVSDKAAGNKLTF

SEQ ID NO: 993 - protein, 14 aa, Homo sapiens
  CDR3 alpha of TCR that specifically recognizes antigen associated with a disorder
CAVTPKSGYSTLTF

SEQ ID NO: 994 - protein, 16 aa, Homo sapiens
  CDR3 alpha of TCR that specifically recognizes antigen associated with a disorder
CAYRSLSTGTASKLTF

SEQ ID NO: 995 - protein, 16 aa, Homo sapiens
  CDR3 alpha of TCR that specifically recognizes antigen associated with a disorder
CGTEKPGSGNTGKLIF

SEQ ID NO: 996 - protein, 12 aa, Homo sapiens
  CDR3 alpha of TCR that specifically recognizes antigen associated with a disorder
CIAIYNFNKFYF

SEQ ID NO: 997 - protein, 14 aa, Homo sapiens
  CDR3 alpha of TCR that specifically recognizes antigen associated with a disorder
CIVRVDSGTYKYIF

SEQ ID NO: 998 - protein, 15 aa, Homo sapiens
  CDR3 alpha of TCR that specifically recognizes antigen associated with a disorder
CIVRVEIQGAQKLVF

SEQ ID NO: 999 - protein, 15 aa, Homo sapiens
  CDR3 alpha of TCR that specifically recognizes antigen associated with a disorder
CIVRVEIQGAQKLVF

SEQ ID NO: 1000 - protein, 18 aa, Homo sapiens
  CDR3 alpha of TCR that specifically recognizes antigen associated with a disorder
CIVRVSSAYYNQGGKLIF

SEQ ID NO: 1001 - protein, 14 aa, Homo sapiens
  CDR3 alpha of TCR that specifically recognizes antigen associated with a disorder
CIVRVVTGANNLFF

SEQ ID NO: 1002 - protein, 13 aa, Homo sapiens
  CDR3 alpha of TCR that specifically recognizes antigen associated with a disorder
CIVSHNAGNMLTF

SEQ ID NO: 1003 - protein, 14 aa, Homo sapiens
  CDR3 alpha of TCR that specifically recognizes antigen associated with a disorder
CLVGDFGSARQLTF

SEQ ID NO: 1004 - protein, 16 aa, Homo sapiens
  CDR3 alpha of TCR that specifically recognizes antigen associated with a disorder
CLVGDSLNTNAGKSTF

SEQ ID NO: 1005 - protein, 16 aa, Homo sapiens
  CDR3 alpha of TCR that specifically recognizes antigen associated with a disorder
CLVGDSLNTNAGKSTF

SEQ ID NO: 1006 - protein, 13 aa, Homo sapiens
  CDR3 alpha of TCR that specifically recognizes antigen associated with a disorder
CVISPPGRRALTF

SEQ ID NO: 1007 - protein, 13 aa, Homo sapiens
  CDR3 alpha of TCR that specifically recognizes antigen associated with a disorder
CVVKSTGGFKTIF

SEQ ID NO: 1008 - protein, 13 aa, Homo sapiens
  CDR3 alpha of TCR that specifically recognizes antigen associated with a disorder
CVVNPTDDYKLSF

SEQ ID NO: 1009 - protein, 13 aa, Homo sapiens
  CDR3 alpha of TCR that specifically recognizes antigen associated with a disorder
CVVNPTDDYKLSF

SEQ ID NO: 1010 - protein, 13 aa, Homo sapiens
  CDR3 alpha of TCR that specifically recognizes antigen associated with a disorder
CVVNPTDDYKLSF

SEQ ID NO: 1011 - protein, 15 aa, Homo sapiens
  CDR3 alpha of TCR that specifically recognizes antigen associated with a disorder
CVVNVRGSTLGRLYF

SEQ ID NO: 1012 - protein, 16 aa, Homo sapiens
  CDR3 alpha of TCR that specifically recognizes antigen associated with a disorder
CVVSAAGGGGADGLTF

SEQ ID NO: 1013 - protein, 14 aa, Homo sapiens
  CDR3 alpha of TCR that specifically recognizes antigen associated with a disorder
CVVSAKAAGNKLTF

SEQ ID NO: 1014 - protein, 14 aa, Homo sapiens
  CDR3 alpha of TCR that specifically recognizes antigen associated with a disorder
CVVSAKAAGNKLTF

SEQ ID NO: 1015 - protein, 20 aa, Homo sapiens
  CDR3 alpha of TCR that specifically recognizes antigen associated with a disorder
YFCADAGGTSYKLFGQGTIL

SEQ ID NO: 1016 - protein, 23 aa, Homo sapiens
  CDR3 alpha of TCR that specifically recognizes antigen associated with a disorder
YFCAVGALAGTASKLTFGTGTRL

SEQ ID NO: 1017 - protein, 22 aa, Homo sapiens
  CDR3 alpha of TCR that specifically recognizes antigen associated with a disorder
YFCAVVNMDSNYQLIWGAGTKL

SEQ ID NO: 1018 - protein, 22 aa, Homo sapiens
  CDR3 alpha of TCR that specifically recognizes antigen associated with a disorder
YYCIPGSEEYGNKLVFGAGTIL

SEQ ID NO: 1019 - protein, 25 aa, Homo sapiens
  CDR3 alpha of TCR that specifically recognizes antigen associated with a disorder
YCIVRIYNQGGKLIFGQGTELSVKP

SEQ ID NO: 1020 - protein, 30 aa, Homo sapiens
  CDR3 alpha of TCR that specifically recognizes antigen associated with a disorder
YFCAEMRPHNNNDMRFGAGTRLTVKPNIQN

SEQ ID NO: 1021 - protein, 15 aa, Homo sapiens
  CDR3 beta of TCR that specifically recognizes antigen associated with a disorder
CASSLRANPGYEQYF

SEQ ID NO: 1022 - protein, 12 aa, Homo sapiens
  CDR3 beta of TCR that specifically recognizes antigen associated with a disorder
CASSRTNEKLFF

SEQ ID NO: 1023 - protein, 16 aa, Homo sapiens
  CDR3 beta of TCR that specifically recognizes antigen associated with a disorder
CASSKGTGVSTDTQYF

SEQ ID NO: 1024 - protein, 13 aa, Homo sapiens
  CDR3 beta of TCR that specifically recognizes antigen associated with a disorder
CASSEEQGAIAFF

SEQ ID NO: 1025 - protein, 15 aa, Homo sapiens
  CDR3 beta of TCR that specifically recognizes antigen associated with a disorder
CASSLARGTLYEQYF

SEQ ID NO: 1026 - protein, 14 aa, Homo sapiens
  CDR3 beta of TCR that specifically recognizes antigen associated with a disorder
CASSMGGALEKLFF

SEQ ID NO: 1027 - protein, 14 aa, Homo sapiens
  CDR3 beta of TCR that specifically recognizes antigen associated with a disorder
CASSPQQVLGEAFF

SEQ ID NO: 1028 - protein, 15 aa, Homo sapiens
  CDR3 beta of TCR that specifically recognizes antigen associated with a disorder
CASSPRGGSYNEQFF

SEQ ID NO: 1029 - protein, 15 aa, Homo sapiens
  CDR3 beta of TCR that specifically recognizes antigen associated with a disorder
CASSRGRGSYNEQFF

SEQ ID NO: 1030 - protein, 15 aa, Homo sapiens
  CDR3 beta of TCR that specifically recognizes antigen associated with a disorder
CSARDLRETNEKLFF

SEQ ID NO: 1031 - protein, 14 aa, Homo sapiens
  CDR3 beta of TCR that specifically recognizes antigen associated with a disorder
CASSLTSGLKKQYF

SEQ ID NO: 1032 - protein, 14 aa, Homo sapiens
  CDR3 beta of TCR that specifically recognizes antigen associated with a disorder
CAISAETLNEKLFF

SEQ ID NO: 1033 - protein, 14 aa, Homo sapiens
  CDR3 beta of TCR that specifically recognizes antigen associated with a disorder
CAIREDRNNYGYTF

SEQ ID NO: 1034 - protein, 14 aa, Homo sapiens
  CDR3 beta of TCR that specifically recognizes antigen associated with a disorder
CSARDGPTNEKLFF

SEQ ID NO: 1035 - protein, 14 aa, Homo sapiens
  CDR3 beta of TCR that specifically recognizes antigen associated with a disorder
CASSESGGLGGYTF

SEQ ID NO: 1036 - protein, 14 aa, Homo sapiens
  CDR3 beta of TCR that specifically recognizes antigen associated with a disorder
CASRLRRSTDTQYF

SEQ ID NO: 1037 - protein, 15 aa, Homo sapiens
  CDR3 beta of TCR that specifically recognizes antigen associated with a disorder
CASSLARGTLYEQYF

SEQ ID NO: 1038 - protein, 14 aa, Homo sapiens
  CDR3 beta of TCR that specifically recognizes antigen associated with a disorder
CATSSRMGGDTQYF

SEQ ID NO: 1039 - protein, 15 aa, Homo sapiens
  CDR3 beta of TCR that specifically recognizes antigen associated with a disorder
CASSIVDRGGETQYF

SEQ ID NO: 1040 - protein, 13 aa, Homo sapiens
  CDR3 beta of TCR that specifically recognizes antigen associated with a disorder
CASSLRAWETQYF

SEQ ID NO: 1041 - protein, 15 aa, Homo sapiens
  CDR3 beta of TCR that specifically recognizes antigen associated with a disorder
CASSQGGDRGESEAF

SEQ ID NO: 1042 - protein, 12 aa, Homo sapiens
  CDR3 beta of TCR that specifically recognizes antigen associated with a disorder
CASRPVAGLPHF

SEQ ID NO: 1043 - protein, 13 aa, Homo sapiens
  CDR3 beta of TCR that specifically recognizes antigen associated with a disorder
CASSFRSTDTQYF

SEQ ID NO: 1044 - protein, 14 aa, Homo sapiens
  CDR3 beta of TCR that specifically recognizes antigen associated with a disorder
CASSVRTLDTGELF

SEQ ID NO: 1045 - protein, 14 aa, Homo sapiens
  CDR3 beta of TCR that specifically recognizes antigen associated with a disorder
CASSLRWGDGGKLF

SEQ ID NO: 1046 - protein, 15 aa, Homo sapiens
  CDR3 beta of TCR that specifically recognizes antigen associated with a disorder
CASSLGYGVSTGELF

SEQ ID NO: 1047 - protein, 13 aa, Homo sapiens
  CDR3 beta of TCR that specifically recognizes antigen associated with a disorder
CASSLRSTDTQYF

SEQ ID NO: 1048 - protein, 15 aa, Homo sapiens
  CDR3 beta of TCR that specifically recognizes antigen associated with a disorder
CSVAALAGFQETQYF

SEQ ID NO: 1049 - protein, 13 aa, Homo sapiens
  CDR3 beta of TCR that specifically recognizes antigen associated with a disorder
CASSLNWDTEAFF

SEQ ID NO: 1050 - protein, 14 aa, Homo sapiens
  CDR3 beta of TCR that specifically recognizes antigen associated with a disorder
CASSINALVGEQFF

SEQ ID NO: 1051 - protein, 14 aa, Homo sapiens
  CDR3 beta of TCR that specifically recognizes antigen associated with a disorder
CSAREPDNTGELFF

SEQ ID NO: 1052 - protein, 15 aa, Homo sapiens
  CDR3 beta of TCR that specifically recognizes antigen associated with a disorder
CASSPTALGTDTQYF

SEQ ID NO: 1053 - protein, 16 aa, Homo sapiens
  CDR3 beta of TCR that specifically recognizes antigen associated with a disorder
CASSLASAGGTDTQYF

SEQ ID NO: 1054 - protein, 15 aa, Homo sapiens
  CDR3 beta of TCR that specifically recognizes antigen associated with a disorder
CASSLDGLTNTEAFF

SEQ ID NO: 1055 - protein, 13 aa, Homo sapiens
  CDR3 beta of TCR that specifically recognizes antigen associated with a disorder
CSAGQGGTGELFF

SEQ ID NO: 1056 - protein, 15 aa, Homo sapiens
  CDR3 beta of TCR that specifically recognizes antigen associated with a disorder
CASSLEGQGASEQFF

SEQ ID NO: 1057 - protein, 14 aa, Homo sapiens
  CDR3 beta of TCR that specifically recognizes antigen associated with a disorder
CSASRWRSTDTQYF

SEQ ID NO: 1058 - protein, 14 aa, Homo sapiens
  CDR3 beta of TCR that specifically recognizes antigen associated with a disorder
CASSPAFSTDTQYF

SEQ ID NO: 1059 - protein, 14 aa, Homo sapiens
  CDR3 beta of TCR that specifically recognizes antigen associated with a disorder
CSAYRTWDQETQYF

SEQ ID NO: 1060 - protein, 14 aa, Homo sapiens
  CDR3 beta of TCR that specifically recognizes antigen associated with a disorder
CASSFSPAGSEAFF

SEQ ID NO: 1061 - protein, 14 aa, Homo sapiens
  CDR3 beta of TCR that specifically recognizes antigen associated with a disorder
CSVSGGPSTDTQYF

SEQ ID NO: 1062 - protein, 16 aa, Homo sapiens
  CDR3 beta of TCR that specifically recognizes antigen associated with a disorder
CASSQGLAGVQETQYF

SEQ ID NO: 1063 - protein, 13 aa, Homo sapiens
  CDR3 beta of TCR that specifically recognizes antigen associated with a disorder
CSAGVGGQETQYF

SEQ ID NO: 1064 - protein, 12 aa, Homo sapiens
  CDR3 beta of TCR that specifically recognizes antigen associated with a disorder
CSVGQTDSPLHF

SEQ ID NO: 1065 - protein, 14 aa, Homo sapiens
  CDR3 beta of TCR that specifically recognizes antigen associated with a disorder
CASSFPQVTDTQYF

SEQ ID NO: 1066 - protein, 14 aa, Homo sapiens
  CDR3 beta of TCR that specifically recognizes antigen associated with a disorder
CASSFPQVTDTQYF

SEQ ID NO: 1067 - protein, 15 aa, Homo sapiens
  CDR3 beta of TCR that specifically recognizes antigen associated with a disorder
CASSHVDRGGETQYF

SEQ ID NO: 1068 - protein, 15 aa, Homo sapiens
  CDR3 beta of TCR that specifically recognizes antigen associated with a disorder
CASSHVDRGGETQYF

SEQ ID NO: 1069 - protein, 18 aa, Homo sapiens
  CDR3 beta of TCR that specifically recognizes antigen associated with a disorder
CASSQYQSLVRGNNEQFF

SEQ ID NO: 1070 - protein, 15 aa, Homo sapiens
  CDR3 beta of TCR that specifically recognizes antigen associated with a disorder
CASSFRALAADTQYF

SEQ ID NO: 1071 - protein, 13 aa, Homo sapiens
  CDR3 beta of TCR that specifically recognizes antigen associated with a disorder
CASSFRFTDTQYF

SEQ ID NO: 1072 - protein, 13 aa, Homo sapiens
  CDR3 beta of TCR that specifically recognizes antigen associated with a disorder
CASSVRSTDTQYF

SEQ ID NO: 1073 - protein, 15 aa, Homo sapiens
  CDR3 beta of TCR that specifically recognizes antigen associated with a disorder
CASSIRTSGDHEQYF

SEQ ID NO: 1074 - protein, 13 aa, Homo sapiens
  CDR3 beta of TCR that specifically recognizes antigen associated with a disorder
CSAFPGGDTEAFF

SEQ ID NO: 1075 - protein, 15 aa, Homo sapiens
  CDR3 beta of TCR that specifically recognizes antigen associated with a disorder
CASSYVGGDTDTQYF

SEQ ID NO: 1076 - protein, 13 aa, Homo sapiens
  CDR3 beta of TCR that specifically recognizes antigen associated with a disorder
CSATLGGDYGYTF

SEQ ID NO: 1077 - protein, 15 aa, Homo sapiens
  CDR3 beta of TCR that specifically recognizes antigen associated with a disorder
CSAQLAGGGGDTQYF

SEQ ID NO: 1078 - protein, 15 aa, Homo sapiens
  CDR3 beta of TCR that specifically recognizes antigen associated with a disorder
CASSLADRVNTEAFF

SEQ ID NO: 1079 - protein, 23 aa, Homo sapiens
  CDR3 beta of TCR that specifically recognizes antigen associated with a disorder
CASSGGSGRGEQYFGPGTRLTVT

SEQ ID NO: 1080 - protein, 25 aa, Homo sapiens
  CDR3 beta of TCR that specifically recognizes antigen associated with a disorder
CASSLEGTVVTGELFFGEGSRLTVL

SEQ ID NO: 1081 - protein, 25 aa, Homo sapiens
  CDR3 beta of TCR that specifically recognizes antigen associated with a disorder
CASRTGTGRASTEAFFGQGTRLTVV

SEQ ID NO: 1082 - protein, 25 aa, Homo sapiens
  CDR3 beta of TCR that specifically recognizes antigen associated with a disorder
CSASEGTSGNPTGLFFGEGSRLTVL

SEQ ID NO: 1083 - protein, 24 aa, Homo sapiens
  CDR3 beta of TCR that specifically recognizes antigen associated with a disorder
CAWSAPGTAYTEAFFGQGTRLTVV

SEQ ID NO: 1084 - protein, 25 aa, Homo sapiens
  CDR3 beta of TCR that specifically recognizes antigen associated with a disorder
CASSQGPSGNTGELFFGEGSRLTVL

SEQ ID NO: 1085 - protein, 25 aa, Homo sapiens
  CDR3 beta of TCR that specifically recognizes antigen associated with a disorder
CASSQGPSGNTGELFFGEGSRLTVL

SEQ ID NO: 1086 - protein, 25 aa, Homo sapiens
  CDR3 beta of TCR that specifically recognizes antigen associated with a disorder
CASSQGPSGNTGELFFGEGSRLTVL

SEQ ID NO: 1087 - protein, 21 aa, Homo sapiens
  CDR3 beta of TCR that specifically recognizes antigen associated with a disorder
CASSEWASGYTFGSGTRLTVV

SEQ ID NO: 1088 - protein, 24 aa, Homo sapiens
  CDR3 beta of TCR that specifically recognizes antigen associated with a disorder
CASSSGSQAAYEQYFGPGTRLTVT

SEQ ID NO: 1089 - protein, 24 aa, Homo sapiens
  CDR3 beta of TCR that specifically recognizes antigen associated with a disorder
CASRGNRAPSYEQYFGPGTRLTVT

SEQ ID NO: 1090 - protein, 13 aa, Homo sapiens
  CDR3 beta of TCR that specifically recognizes antigen associated with a disorder
CSAKPGTGVGEDL

SEQ ID NO: 1091 - protein, 26 aa, Homo sapiens
  CDR3 beta of TCR that specifically recognizes antigen associated with a disorder
CASSQGSGGGVTGELFFGEGSRLTVL

SEQ ID NO: 1092 - protein, 26 aa, Homo sapiens
  CDR3 beta of TCR that specifically recognizes antigen associated with a disorder
CASSQGSGGGVTGELFFGEGSRLTVL

SEQ ID NO: 1093 - protein, 26 aa, Homo sapiens
  CDR3 beta of TCR that specifically recognizes antigen associated with a disorder
CASSQGSGGGVTGELFFGEGSRLTVL

SEQ ID NO: 1094 - protein, 24 aa, Homo sapiens
  CDR3 beta of TCR that specifically recognizes antigen associated with a disorder
CASSRGTILGNEQFFGPGTRLTVL

SEQ ID NO: 1095 - protein, 24 aa, Homo sapiens
  CDR3 beta of TCR that specifically recognizes antigen associated with a disorder
CSAKKGTSWKDTQYFGPGTRLTVL

SEQ ID NO: 1096 - protein, 23 aa, Homo sapiens
  CDR3 beta of TCR that specifically recognizes antigen associated with a disorder
CSARGGSYNSPLHFGNGTRLTVT

SEQ ID NO: 1097 - protein, 23 aa, Homo sapiens
  CDR3 beta of TCR that specifically recognizes antigen associated with a disorder
CSARGGSYNSPLHFGNGTRLTVT

SEQ ID NO: 1098 - protein, 23 aa, Homo sapiens
  CDR3 beta of TCR that specifically recognizes antigen associated with a disorder
CSARGGSYNSPLHFGNGTRLTVT

SEQ ID NO: 1099 - protein, 23 aa, Homo sapiens
  CDR3 beta of TCR that specifically recognizes antigen associated with a disorder
CSARGGSYNSPLHFGNGTRLTVT

SEQ ID NO: 1100 - protein, 27 aa, Homo sapiens
  CDR3 beta of TCR that specifically recognizes antigen associated with a disorder
YLCATSALGDTQYFGPGTRLTVLEDLK

SEQ ID NO: 1101 - protein, 30 aa, Homo sapiens
  CDR3 beta of TCR that specifically recognizes antigen associated with a disorder
YLCASSTDWSSYNEQFFGPGTRLTVLEDLK

SEQ ID NO: 1102 - protein, 31 aa, Homo sapiens
  CDR3 beta of TCR that specifically recognizes antigen associated with a disorder
YICSARDLTSGSLNEQFFGPGTRLTVLEDLK

SEQ ID NO: 1103 - protein, 30 aa, Homo sapiens
  CDR3 beta of TCR that specifically recognizes antigen associated with a disorder
YLCASSIRHRTNTEAFFGQGTRLTVVEDLN

SEQ ID NO: 1104 - protein, 30 aa, Homo sapiens
  CDR3 beta of TCR that specifically recognizes antigen associated with a disorder
YLCSAWPSGQGTYGYTFGSGTRLTVVEDLN

SEQ ID NO: 1105 - protein, 29 aa, Homo sapiens
  CDR3 beta of TCR that specifically recognizes antigen associated with a disorder
YLCASRTSGSYNEQFFGPGTRLTVLEDLK

SEQ ID NO: 1106 - protein, 31 aa, Homo sapiens
  CDR3 beta of TCR that specifically recognizes antigen associated with a disorder
YICSARDLTSGANNEQFFGPGTRLTVLEDLK

SEQ ID NO: 1107 - protein, 13 aa, Homo sapiens
  CDR3 beta of TCR that specifically recognizes antigen associated with a disorder
CASGRSSYNEQFF

SEQ ID NO: 1108 - protein, 13 aa, Homo sapiens
  CDR3 beta of TCR that specifically recognizes antigen associated with a disorder
ASSLAGGANSPLH

SEQ ID NO: 1109 - protein, 13 aa, Homo sapiens
  CDR3 beta of TCR that specifically recognizes antigen associated with a disorder
ASSLVGGPSSEAF

SEQ ID NO: 1110 - protein, 15 aa, Homo sapiens
  CDR3 beta of TCR that specifically recognizes antigen associated with a disorder
CASSPWGAGGTDTQY

SEQ ID NO: 1111 - protein, 15 aa, Homo sapiens
  CDR3 beta of TCR that specifically recognizes antigen associated with a disorder
CASSLALGQGNQQFF

SEQ ID NO: 1112 - protein, 10 aa, Homo sapiens
  CDR3 beta of TCR that specifically recognizes antigen associated with a disorder
ASLKATDTQY

SEQ ID NO: 1113 - protein, 14 aa, Homo sapiens
  CDR3 beta of TCR that specifically recognizes antigen associated with a disorder
CASRLDPSTDTQYF

SEQ ID NO: 1114 - protein, 14 aa, Homo sapiens
  CDR3 beta of TCR that specifically recognizes antigen associated with a disorder
CASRLDPSTDTQYF

SEQ ID NO: 1115 - protein, 17 aa, Homo sapiens
  CDR3 beta of TCR that specifically recognizes antigen associated with a disorder
CASSFRGLGGGTDTQYF

SEQ ID NO: 1116 - protein, 17 aa, Homo sapiens
  CDR3 beta of TCR that specifically recognizes antigen associated with a disorder
CASSFRGLGGGTDTQYF

SEQ ID NO: 1117 - protein, 13 aa, Homo sapiens
  CDR3 beta of TCR that specifically recognizes antigen associated with a disorder
CASRPRDPVTQYF

SEQ ID NO: 1118 - protein, 16 aa, Homo sapiens
  CDR3 beta of TCR that specifically recognizes antigen associated with a disorder
CASRAKAGGTGETQYF

SEQ ID NO: 1119 - protein, 13 aa, Homo sapiens
  CDR3 beta of TCR that specifically recognizes antigen associated with a disorder
CASRPRRDNEQFF

SEQ ID NO: 1120 - protein, 16 aa, Homo sapiens
  CDR3 beta of TCR that specifically recognizes antigen associated with a disorder
CASSSFWRQFDQPQHF

SEQ ID NO: 1121 - protein, 13 aa, Homo sapiens
  CDR3 beta of TCR that specifically recognizes antigen associated with a disorder
CASSIGPTQPQHF

SEQ ID NO: 1122 - protein, 12 aa, Homo sapiens
  CDR3 beta of TCR that specifically recognizes antigen associated with a disorder
CSARTEAYEQYF

SEQ ID NO: 1123 - protein, 14 aa, Homo sapiens
  CDR3 beta of TCR that specifically recognizes antigen associated with a disorder
CASSGGGSTDTQYF

SEQ ID NO: 1124 - protein, 10 aa, Homo sapiens
  CDR3 beta of TCR that specifically recognizes antigen associated with a disorder
CASSAETQYF

SEQ ID NO: 1125 - protein, 14 aa, Homo sapiens
  CDR3 beta of TCR that specifically recognizes antigen associated with a disorder
CASSPTTGGDEAFF

SEQ ID NO: 1126 - protein, 13 aa, Homo sapiens
  CDR3 beta of TCR that specifically recognizes antigen associated with a disorder
CASSLYGGDEAFF

SEQ ID NO: 1127 - protein, 16 aa, Homo sapiens
  CDR3 beta of TCR that specifically recognizes antigen associated with a disorder
CASSTRTGQGGNEQYF

SEQ ID NO: 1128 - protein, 16 aa, Homo sapiens
  CDR3 beta of TCR that specifically recognizes antigen associated with a disorder
CASSTRTGQGGNEQYF

SEQ ID NO: 1129 - protein, 15 aa, Homo sapiens
  CDR3 beta of TCR that specifically recognizes antigen associated with a disorder
CASSLGLRGENIQYF

SEQ ID NO: 1130 - protein, 19 aa, Homo sapiens
  CDR3 beta of TCR that specifically recognizes antigen associated with a disorder
CAISESASGGAFIGNEQFF

SEQ ID NO: 1131 - protein, 15 aa, Homo sapiens
  CDR3 beta of TCR that specifically recognizes antigen associated with a disorder
CASSRGGGNTGELFF

SEQ ID NO: 1132 - protein, 11 aa, Homo sapiens
  CDR3 beta of TCR that specifically recognizes antigen associated with a disorder
CASSAGNTIYF

SEQ ID NO: 1133 - protein, 15 aa, Homo sapiens
  CDR3 beta of TCR that specifically recognizes antigen associated with a disorder
CASSYAWGRATEAFF

SEQ ID NO: 1134 - protein, 14 aa, Homo sapiens
  CDR3 beta of TCR that specifically recognizes antigen associated with a disorder
CATQGVGENTEAFF

SEQ ID NO: 1135 - protein, 15 aa, Homo sapiens
  CDR3 beta of TCR that specifically recognizes antigen associated with a disorder
CASSQDLAGVREQYF

SEQ ID NO: 1136 - protein, 14 aa, Homo sapiens
  CDR3 beta of TCR that specifically recognizes antigen associated with a disorder
CSARDQQRVDTQYF

SEQ ID NO: 1137 - protein, 16 aa, Homo sapiens
  CDR3 beta of TCR that specifically recognizes antigen associated with a disorder
CASSSFWGSDTGELFF

SEQ ID NO: 1138 - protein, 14 aa, Homo sapiens
  CDR3 beta of TCR that specifically recognizes antigen associated with a disorder
CASLLVAGANVLTF

SEQ ID NO: 1139 - protein, 12 aa, Homo sapiens
  CDR3 beta of TCR that specifically recognizes antigen associated with a disorder
CASSLERDGYTF

SEQ ID NO: 1140 - protein, 15 aa, Homo sapiens
  CDR3 beta of TCR that specifically recognizes antigen associated with a disorder
CASSPIIWGTGELFF

SEQ ID NO: 1141 - protein, 15 aa, Homo sapiens
  CDR3 beta of TCR that specifically recognizes antigen associated with a disorder
CASSPIIWGTGELFF

SEQ ID NO: 1142 - protein, 14 aa, Homo sapiens
  CDR3 beta of TCR that specifically recognizes antigen associated with a disorder
CASRGTVSYNEQFF

SEQ ID NO: 1143 - protein, 14 aa, Homo sapiens
  CDR3 beta of TCR that specifically recognizes antigen associated with a disorder
CSARDLAIPDTQYF

SEQ ID NO: 1144 - protein, 14 aa, Homo sapiens
  CDR3 beta of TCR that specifically recognizes antigen associated with a disorder
CASSSGPTGSPLHF

SEQ ID NO: 1145 - protein, 14 aa, Homo sapiens
  CDR3 beta of TCR that specifically recognizes antigen associated with a disorder
CSARDGARGEKLFF

SEQ ID NO: 1146 - protein, 16 aa, Homo sapiens
  CDR3 beta of TCR that specifically recognizes antigen associated with a disorder
CASSLEASSYNSPLHF

SEQ ID NO: 1147 - protein, 18 aa, Homo sapiens
  CDR3 beta of TCR that specifically recognizes antigen associated with a disorder
CASSLTAGLASTYNEQFF

SEQ ID NO: 1148 - protein, 15 aa, Homo sapiens
  CDR3 beta of TCR that specifically recognizes antigen associated with a disorder
CASSLGPGQRETQYF

SEQ ID NO: 1149 - protein, 15 aa, Homo sapiens
  CDR3 beta of TCR that specifically recognizes antigen associated with a disorder
CASSSPGTEYNEQFF

SEQ ID NO: 1150 - protein, 14 aa, Homo sapiens
  CDR3 beta of TCR that specifically recognizes antigen associated with a disorder
CASSPRANTDTQYF

SEQ ID NO: 1151 - protein, 12 aa, Homo sapiens
  CDR3 beta of TCR that specifically recognizes antigen associated with a disorder
CASSLERETQYF

SEQ ID NO: 1152 - protein, 12 aa, Homo sapiens
  CDR3 beta of TCR that specifically recognizes antigen associated with a disorder
CASSLERETQYF

SEQ ID NO: 1153 - protein, 13 aa, Homo sapiens
  CDR3 beta of TCR that specifically recognizes antigen associated with a disorder
CASSFWGYNEQFF

SEQ ID NO: 1154 - protein, 13 aa, Homo sapiens
  CDR3 beta of TCR that specifically recognizes antigen associated with a disorder
CSVEDRNTGELFF

SEQ ID NO: 1155 - protein, 15 aa, Homo sapiens
  CDR3 beta of TCR that specifically recognizes antigen associated with a disorder
CASSWSSIGNQPQHF

SEQ ID NO: 1156 - protein, 16 aa, Homo sapiens
  CDR3 beta of TCR that specifically recognizes antigen associated with a disorder
CASSSGTSAGTGELFF

SEQ ID NO: 1157 - protein, 16 aa, Homo sapiens
  CDR3 beta of TCR that specifically recognizes antigen associated with a disorder
CSAGGLAGASQETQYF

SEQ ID NO: 1158 - protein, 16 aa, Homo sapiens
  CDR3 beta of TCR that specifically recognizes antigen associated with a disorder
CSARSLASGGPDTQYF

SEQ ID NO: 1159 - protein, 16 aa, Homo sapiens
  CDR3 beta of TCR that specifically recognizes antigen associated with a disorder
CSARSLASGGPDTQYF

SEQ ID NO: 1160 - protein, 16 aa, Homo sapiens
  CDR3 beta of TCR that specifically recognizes antigen associated with a disorder
CSARSLASGGPDTQYF

SEQ ID NO: 1161 - protein, 14 aa, Homo sapiens
  CDR3 beta of TCR that specifically recognizes antigen associated with a disorder
CSVLFRDRRTEAFF

SEQ ID NO: 1162 - protein, 15 aa, Homo sapiens
  CDR3 beta of TCR that specifically recognizes antigen associated with a disorder
CASSVDPGVYNEQFF

SEQ ID NO: 1163 - protein, 15 aa, Homo sapiens
  CDR3 beta of TCR that specifically recognizes antigen associated with a disorder
CASSLAGTDHYEQYF

SEQ ID NO: 1164 - protein, 15 aa, Homo sapiens
  CDR3 beta of TCR that specifically recognizes antigen associated with a disorder
CASSLAGTDHYEQYF

SEQ ID NO: 1165 - protein, 23 aa, Homo sapiens
  CDR3 beta of TCR that specifically recognizes antigen associated with a disorder
CASSLATSGGGSDTQYFGPGTRL

SEQ ID NO: 1166 - protein, 22 aa, Homo sapiens
  CDR3 beta of TCR that specifically recognizes antigen associated with a disorder
CSVEATRADTQYFGPGTRLTVL

SEQ ID NO: 1167 - protein, 23 aa, Homo sapiens
  CDR3 beta of TCR that specifically recognizes antigen associated with a disorder
CASSLATSGGGSDTQYFGPGTRL

SEQ ID NO: 1168 - protein, 23 aa, Homo sapiens
  CDR3 beta of TCR that specifically recognizes antigen associated with a disorder
CASSLATSGGGSDTQYFGPGTRL

SEQ ID NO: 1169 - protein, 23 aa, Homo sapiens
  CDR3 beta of TCR that specifically recognizes antigen associated with a disorder
CSASIGTGADTQYFGPGTRLTVL

SEQ ID NO: 1170 - protein, 23 aa, Homo sapiens
  CDR3 beta of TCR that specifically recognizes antigen associated with a disorder
CASRSPGSNYGYTFGSGTRLTVV

SEQ ID NO: 1171 - protein, 20 aa, Homo sapiens
  antigenic epitope associated with a disorder and recognized by specific TCR
RRFEYDDPRFLRLLDLAQEG

SEQ ID NO: 1172 - protein, 20 aa, Homo sapiens
  antigenic epitope associated with a disorder and recognized by specific TCR
AGMVTTSTTLAWGLLLMILH

SEQ ID NO: 1173 - protein, 20 aa, Homo sapiens
  antigenic epitope associated with a disorder and recognized by specific TCR
TLAWGLLLMILHPDVQRRVQ

SEQ ID NO: 1174 - protein, 20 aa, Homo sapiens
  :   antigenic epitope associated with a disorder and recognized by specific TCR
TTLITNLSSVLKDEAVWEKP

SEQ ID NO: 1175 - protein, 52 aa, Homo sapiens; identical to SEQ ID NO: 661
  antigenic epitope associated with a disorder and recognized by specific TCR

SEQ ID NO: 1176 - protein, 36 aa, Homo sapiens; identical to SEQ ID NO: 662
  :   antigenic epitope associated with a disorder and recognized by specific TCR

SEQ ID NO: 1177 - protein, 44 aa, Homo sapiens; identical to SEQ ID NO: 663
  antigenic epitope associated with a disorder and recognized by specific TCR

SEQ ID NO: 1178 - protein, 20 aa, Homo sapiens
  antigenic epitope associated with a disorder and recognized by specific TCR
KAKGNPESSFNDENLRIVVA

SEQ ID NO: 1179 - protein, 44 aa, Homo sapiens; identical to SEQ ID NO: 665
  antigenic epitope associated with a disorder and recognized by specific TCR

SEQ ID NO: 1180 - protein, 36 aa, Homo sapiens; identical to SEQ ID NO: 666
  :   antigenic epitope associated with a disorder and recognized by specific TCR

SEQ ID NO: 1181 - protein, 28 aa, Homo sapiens
  antigenic epitope associated with a disorder and recognized by specific TCR
WEKPFRFHPEHFLDAQGHFVKPEAFLPF

SEQ ID NO: 1182 - protein, 9 aa, Homo sapiens
  antigenic epitope associated with a disorder and recognized by specific TCR
RLLDLAEGL

SEQ ID NO: 1183 - protein, 10 aa, Homo sapiens
  antigenic epitope associated with a disorder and recognized by specific TCR
GLEALVPLAV

SEQ ID NO: 1184 - protein, 10 aa, Homo sapiens
  antigenic epitope associated with a disorder and recognized by specific TCR
KAFLTQLDEL

SEQ ID NO: 1185 - protein, 10 aa, Homo sapiens
  antigenic epitope associated with a disorder and recognized by specific TCR
TTLITNLSSV

SEQ ID NO: 1186 - protein, 10 aa, Homo sapiens
  antigenic epitope associated with a disorder and recognized by specific TCR
LLDKAVSNVI

SEQ ID NO: 1187 - protein, 20 aa, Homo sapiens
  antigenic epitope associated with a disorder and recognized by specific TCR
SEVEDVIPEGWKADTSYEAK

SEQ ID NO: 1188 - protein, 20 aa, Homo sapiens
  antigenic epitope associated with a disorder and recognized by specific TCR
EEPIAPYHFDLSGHAFGSMA

SEQ ID NO: 1189 - protein, 20 aa, Homo sapiens
  antigenic epitope associated with a disorder and recognized by specific TCR
SEFEDVIPEGWKADTSYSAK

SEQ ID NO: 1190 - protein, 20 aa, Homo sapiens
  :   antigenic epitope associated with a disorder and recognized by specific TCR
EEPIAPYHFDLSGHAFGSMA

SEQ ID NO: 1191 - protein, 20 aa, Homo sapiens
  antigenic epitope associated with a disorder and recognized by specific TCR
EEPIAPYHFDLSGHAFGAMA

SEQ ID NO: 1192 - protein, 20 aa, Homo sapiens
  antigenic epitope associated with a disorder and recognized by specific TCR
TEAEDVIPEGWKADTSYESK

SEQ ID NO: 1193 - protein, 20 aa, Homo sapiens
  antigenic epitope associated with a disorder and recognized by specific TCR
EEPIAAYHFDLSGKAFGAMA

SEQ ID NO: 1194 - protein, 20 aa, Homo sapiens
  antigenic epitope associated with a disorder and recognized by specific TCR
GEAEDVIPEGWKADTAYASK

SEQ ID NO: 1195 - protein, 13 aa, Homo sapiens
  antigenic epitope associated with a disorder and recognized by specific TCR
AAYKIAATAANAA

SEQ ID NO: 1196 - protein, 13 aa, Homo sapiens
  :   antigenic epitope associated with a disorder and recognized by specific TCR
ESYKFIPTLEAAV

SEQ ID NO: 1197 - protein, 13 aa, Homo sapiens
  antigenic epitope associated with a disorder and recognized by specific TCR
AAFRIAATAANAA

SEQ ID NO: 1198 - protein, 13 aa, Homo sapiens
  antigenic epitope associated with a disorder and recognized by specific TCR
EAYKFIPSLETAV

SEQ ID NO: 1199 - protein, 13 aa, Homo sapiens
  antigenic epitope associated with a disorder and recognized by specific TCR
AAFRTAATAADAA

SEQ ID NO: 1200 - protein, 13 aa, Homo sapiens
  antigenic epitope associated with a disorder and recognized by specific TCR
ESYKFIPALEAAV

SEQ ID NO: 1201 - protein, 13 aa, Homo sapiens
  antigenic epitope associated with a disorder and recognized by specific TCR
AAYRTAATAANAA

SEQ ID NO: 1202 - protein, 13 aa, Homo sapiens
  antigenic epitope associated with a disorder and recognized by specific TCR
DSYKFIPTLVAAV

SEQ ID NO: 1203 - protein, 13 aa, Homo sapiens
  antigenic epitope associated with a disorder and recognized by specific TCR
AAFKIAATAANSA

SEQ ID NO: 1204 - protein, 13 aa, Homo sapiens
  :   antigenic epitope associated with a disorder and recognized by specific TCR
ETYKFIPSLEAAV

SEQ ID NO: 1205 - protein, 13 aa, Homo sapiens
  antigenic epitope associated with a disorder and recognized by specific TCR
AAFKVAATAANAA

SEQ ID NO: 1206 - protein, 13 aa, Homo sapiens
  antigenic epitope associated with a disorder and recognized by specific TCR
ESYKFIPALEAAV

SEQ ID NO: 1207 - protein, 13 aa, Homo sapiens
  antigenic epitope associated with a disorder and recognized by specific TCR
AAFKVAATAANAA

SEQ ID NO: 1208 - protein, 13 aa, Homo sapiens
  antigenic epitope associated with a disorder and recognized by specific TCR
DTYKSIPSLEAAV

SEQ ID NO: 1209 - protein, 15 aa, Homo sapiens
  antigenic epitope associated with a disorder and recognized by specific TCR
ARQQWELQGDRRCQS

SEQ ID NO: 1210 - protein, 11 aa, Homo sapiens
  antigenic epitope associated with a disorder and recognized by specific TCR
ANLRPCEQHLM

SEQ ID NO: 1211 - protein, 13 aa, Homo sapiens
  antigenic epitope associated with a disorder and recognized by specific TCR
SQLERANLRPCEQ

SEQ ID NO: 1212 - protein, 13 aa, Homo sapiens
  antigenic epitope associated with a disorder and recognized by specific TCR
FENNQRCMCEALQ

SEQ ID NO: 1213 - protein, 15 aa, Homo sapiens
  antigenic epitope associated with a disorder and recognized by specific TCR
RRPFYSNAPLEIYVQ

SEQ ID NO: 1214 - protein, 15 aa, Homo sapiens
  antigenic epitope associated with a disorder and recognized by specific TCR
QARQLKNNNPFKFFV

SEQ ID NO: 1215 - protein, 15 aa, Homo sapiens
  antigenic epitope associated with a disorder and recognized by specific TCR
EFLAQAFQVDDRQIV

SEQ ID NO: 1216 - protein, 14 aa, Homo sapiens
  antigenic epitope associated with a disorder and recognized by specific TCR
RSILPYGDSMDRIE

SEQ ID NO: 1217 - protein, 14 aa, Homo sapiens
  antigenic epitope associated with a disorder and recognized by specific TCR
KDRLQGMAPAAGAD

SEQ ID NO: 1218 - protein, 17 aa, Homo sapiens
  antigenic epitope associated with a disorder and recognized by specific TCR
ISRIYVSIDVTLQQLES

SEQ ID NO: 1219 - protein, 16 aa, Homo sapiens
  antigenic epitope associated with a disorder and recognized by specific TCR
RNTRNLTYIDPDALKE

SEQ ID NO: 1220 - protein, 19 aa, Homo sapiens
  antigenic epitope associated with a disorder and recognized by specific TCR
GIFNTGLKMFPDLTKVYST

SEQ ID NO: 1221 - protein, 14 aa, Homo sapiens
  antigenic epitope associated with a disorder and recognized by specific TCR
HIEIRNTRNLTYID

SEQ ID NO: 1222 - protein, 14 aa, Homo sapiens
  antigenic epitope associated with a disorder and recognized by specific TCR
GLKMFPDLTKVYST

SEQ ID NO: 1223 - protein, 17 aa, Homo sapiens
  antigenic epitope associated with a disorder and recognized by specific TCR
ISRIYVSIDVTLQQLES

SEQ ID NO: 1224 - protein, 19 aa, Homo sapiens
  antigenic epitope associated with a disorder and recognized by specific TCR
SLSFLHLTRADLSYPSHCC

SEQ ID NO: 1225 - protein, 19 aa, Homo sapiens
  antigenic epitope associated with a disorder and recognized by specific TCR
ENGEWAIDFCPGVIRRHHG

SEQ ID NO: 1226 - protein, 19 aa, Homo sapiens
  antigenic epitope associated with a disorder and recognized by specific TCR
ENGEWAIDFCPGVIRRHHG

SEQ ID NO: 1227 - protein, 9 aa, Homo sapiens
  antigenic epitope associated with a disorder and recognized by specific TCR
TWTYDGSVV

SEQ ID NO: 1228 - protein, 41 aa, Homo sapiens
  antigenic epitope associated with a disorder and recognized by specific TCR
VKKIHIPSEKIWRPDLVLYNNADGDFAIVKFTKVLLQYTGH

SEQ ID NO: 1229 - protein, 30 aa, Homo sapiens
  antigenic epitope associated with a disorder and recognized by specific TCR
DEQNCSMKLGTWTYDGSVVAINPESDQPDL

SEQ ID NO: 1230 - protein, 20 aa, Homo sapiens
  antigenic epitope associated with a disorder and recognized by specific TCR
MKLGTWTYDGSVVAINPESD

SEQ ID NO: 1231 - protein, 41 aa, Homo sapiens; identical to SEQ ID NO: 1228
  antigenic epitope associated with a disorder and recognized by specific TCR

SEQ ID NO: 1232 - protein, 36 aa, Homo sapiens
  antigenic epitope associated with a disorder and recognized by specific TCR
PNWVRKVFIDTIPNIMFFSTMKRPSREKQDKKIFTE

SEQ ID NO: 1233 - protein, 41 aa, Homo sapiens; identical to SEQ ID NO: 1228
  antigenic epitope associated with a disorder and recognized by specific TCR

SEQ ID NO: 1234 - protein, 30 aa, Homo sapiens; identical to SEQ ID NO: 1229
  antigenic epitope associated with a disorder and recognized by specific TCR

SEQ ID NO: 1235 - protein, 20 aa, Homo sapiens
  antigenic epitope associated with a disorder and recognized by specific TCR
MKLGTWTYDGSVVAINPESD

SEQ ID NO: 1236 - protein, 20 aa, Homo sapiens
  antigenic epitope associated with a disorder and recognized by specific TCR
MKLGTWTYDGSVVAINPESD

SEQ ID NO: 1237 - protein, 13 aa, Homo sapiens
  antigenic epitope associated with a disorder and recognized by specific TCR
MKLGTWTYDGSVV

SEQ ID NO: 1238 - protein, 13 aa, Homo sapiens
  antigenic epitope associated with a disorder and recognized by specific TCR
MKLGTWTYDGSVV

SEQ ID NO: 1239 - protein, 13 aa, Homo sapiens
  antigenic epitope associated with a disorder and recognized by specific TCR
PLFSHLQNEQWVD

SEQ ID NO: 1240 - protein, 13 aa, Homo sapiens
  antigenic epitope associated with a disorder and recognized by specific TCR
PLFSHLQNEQWVD

SEQ ID NO: 1241 - protein, 13 aa, Homo sapiens
  antigenic epitope associated with a disorder and recognized by specific TCR
PLFSHLQNEQWVD

SEQ ID NO: 1242 - protein, 13 aa, Homo sapiens
  antigenic epitope associated with a disorder and recognized by specific TCR
PLFSHLQNEQWVD

SEQ ID NO: 1243 - protein, 20 aa, Homo sapiens
  antigenic epitope associated with a disorder and recognized by specific TCR
VRKVFLRLLPQLLRMHVRPL

SEQ ID NO: 1244 - protein, 20 aa, Homo sapiens
  antigenic epitope associated with a disorder and recognized by specific TCR
VRKVFLRLLPQLLRMHVRPL

SEQ ID NO: 1245 - protein, 20 aa, Homo sapiens
  antigenic epitope associated with a disorder and recognized by specific TCR
VRKVFLRLLPQLLRMHVRPL

SEQ ID NO: 1246 - protein, 20 aa, Homo sapiens
  antigenic epitope associated with a disorder and recognized by specific TCR
QIVTTNVRLKQQWVDYNLKW

SEQ ID NO: 1247 - protein, 19 aa, Homo sapiens
  antigenic epitope associated with a disorder and recognized by specific TCR
STHVMPNWVRKVFIDTIPN

SEQ ID NO: 1248 - protein, 20 aa, Homo sapiens
  antigenic epitope associated with a disorder and recognized by specific TCR
QIVTTNVRLKQQWVDYNLKW

SEQ ID NO: 1249 - protein, 19 aa, Homo sapiens
  antigenic epitope associated with a disorder and recognized by specific TCR
STHVMPNWVRKVFIDTIPN

SEQ ID NO: 1250 - protein, 19 aa, Homo sapiens
  antigenic epitope associated with a disorder and recognized by specific TCR
STHVMPNWVRKVFIDTIPN

SEQ ID NO: 1251 - protein, 20 aa, Homo sapiens
  antigenic epitope associated with a disorder and recognized by specific TCR
MKLGTWTYDGSVVAINPESD

SEQ ID NO: 1252 - protein, 13 aa, Homo sapiens
  antigenic epitope associated with a disorder and recognized by specific TCR
MKLGTWTYDGSVV

SEQ ID NO: 1253 - protein, 36 aa, Homo sapiens; identical to SEQ ID NO: 1232
  antigenic epitope associated with a disorder and recognized by specific TCR

SEQ ID NO: 1254 - protein, 13 aa, Homo sapiens
  antigenic epitope associated with a disorder and recognized by specific TCR
MKLGTWTYDGSVV

SEQ ID NO: 1255 - protein, 13 aa, Homo sapiens
  antigenic epitope associated with a disorder and recognized by specific TCR
MKLGTWTYDGSVV

SEQ ID NO: 1256 - protein, 8 aa, Homo sapiens
  antigenic epitope associated with a disorder and recognized by specific TCR
WTYDGSVV

SEQ ID NO: 1257 - protein, 10 aa, Homo sapiens
  antigenic epitope associated with a disorder and recognized by specific TCR
DLRNKILTAT

SEQ ID NO: 1258 - protein, 15 aa, Homo sapiens
  antigenic epitope associated with a disorder and recognized by specific TCR
VRALEEANTELEVKI

SEQ ID NO: 1259 - protein, 15 aa, Homo sapiens
  antigenic epitope associated with a disorder and recognized by specific TCR
ANILLQIDNARLAAD

SEQ ID NO: 1260 - protein, 15 aa, Homo sapiens
  antigenic epitope associated with a disorder and recognized by specific TCR
MQALEIELQSQLSMK

SEQ ID NO: 1261 - protein, 15 aa, Homo sapiens
  antigenic epitope associated with a disorder and recognized by specific TCR
ENRYCVQLSQIQGLI

SEQ ID NO: 1262 - protein, 17 aa, Homo sapiens
  antigenic epitope associated with a disorder and recognized by specific TCR
STRYTLDFDRAQRACLQ

SEQ ID NO: 1263 - protein, 16 aa, Homo sapiens
  antigenic epitope associated with a disorder and recognized by specific TCR
DAGWLADQTVRYPIHT

SEQ ID NO: 1264 - protein, 16 aa, Homo sapiens
  antigenic epitope associated with a disorder and recognized by specific TCR
SAGWLADRSVRYPISK

SEQ ID NO: 1265 - protein, 20 aa, Homo sapiens
  antigenic epitope associated with a disorder and recognized by specific TCR
GYEQCDAGWLRDQTVRYPIV

SEQ ID NO: 1266 - protein, 16 aa, Homo sapiens
  antigenic epitope associated with a disorder and recognized by specific TCR
DVYCFVDRLEGEVFFA

SEQ ID NO: 1267 - protein, 15 aa, Homo sapiens
  antigenic epitope associated with a disorder and recognized by specific TCR
EVFFATRLEQFTFQE

SEQ ID NO: 1268 - protein, 17 aa, Homo sapiens
  antigenic epitope associated with a disorder and recognized by specific TCR
KCYAGWLADGSLRYPIV

SEQ ID NO: 1269 - protein, 17 aa, Homo sapiens
  antigenic epitope associated with a disorder and recognized by specific TCR
NSPFCLERTPLGSPDPA

SEQ ID NO: 1270 - protein, 16 aa, Homo sapiens
  antigenic epitope associated with a disorder and recognized by specific TCR
  VARIANT 11: Xaa = citrulline
DAGWLADQTVXYPIHT

SEQ ID NO: 1271 - protein, 20 aa, Homo sapiens
  antigenic epitope associated with a disorder and recognized by specific TCR
  VARIANT 7, 12: Xaa = citrulline
DEFPGVXTYGIXDTNETYDV

SEQ ID NO: 1272 - protein, 16 aa, Homo sapiens
  antigenic epitope associated with a disorder and recognized by specific TCR
  VARIANT 8, 11: Xaa = citrulline
SAGWLADXSVXYPISK

SEQ ID NO: 1273 - protein, 17 aa, Homo sapiens
  antigenic epitope associated with a disorder and recognized by specific TCR
  VARIANT 7, 12: Xaa = citrulline
GVVFHYXPGPTXYSLTF

SEQ ID NO: 1274 - protein, 20 aa, Homo sapiens
  antigenic epitope associated with a disorder and recognized by specific TCR
  VARIANT 11, 16: Xaa = citrulline
GYEQCDAGWLXDQTVXYPIV

SEQ ID NO: 1275 - protein, 18 aa, Homo sapiens
  antigenic epitope associated with a disorder and recognized by specific TCR
  VARIANT 4, 9: Xaa = citrulline
PGVXTYGVXPSTETYDVY

SEQ ID NO: 1276 - protein, 16 aa, Homo sapiens
  antigenic epitope associated with a disorder and recognized by specific TCR
  VARIANT 8: Xaa = citrulline
DVYCFVDXLEGEVFFA

SEQ ID NO: 1277 - protein, 15 aa, Homo sapiens
  antigenic epitope associated with a disorder and recognized by specific TCR
  VARIANT 7: Xaa = citrulline
EVFFATXLEQFTFQE

SEQ ID NO: 1278 - protein, 17 aa, Homo sapiens
  antigenic epitope associated with a disorder and recognized by specific TCR
  VARIANT 13: Xaa = citrulline
KCYAGWLADGSLXYPIV

SEQ ID NO: 1279 - protein, 17 aa, Homo sapiens
  antigenic epitope associated with a disorder and recognized by specific TCR
  VARIANT 8: Xaa = citrulline
NSPFCLEXTPLGSPDPA

SEQ ID NO: 1280 - protein, 12 aa, Homo sapiens
  antigenic epitope associated with a disorder and recognized by specific TCR
MKPVQKVLEDSD

SEQ ID NO: 1281 - protein, 14 aa, Homo sapiens
  antigenic epitope associated with a disorder and recognized by specific TCR
ERRLFNLDVPESRR

SEQ ID NO: 1282 - protein, 15 aa, Homo sapiens
  antigenic epitope associated with a disorder and recognized by specific TCR
GKLYGIRDVRSTRDR

SEQ ID NO: 1283 - protein, 15 aa, Homo sapiens
  antigenic epitope associated with a disorder and recognized by specific TCR
ATIKAEFVRAETPYM

SEQ ID NO: 1284 - protein, 15 aa, Homo sapiens
  antigenic epitope associated with a disorder and recognized by specific TCR
GKLYGIRDVRSTRDR

SEQ ID NO: 1285 - protein, 14 aa, Homo sapiens
  antigenic epitope associated with a disorder and recognized by specific TCR
  VARIANT 13: Xaa = citrulline
ERRLFNLDVPESXR

SEQ ID NO: 1286 - protein, 15 aa, Homo sapiens
  antigenic epitope associated with a disorder and recognized by specific TCR
  VARIANT 7, 10: Xaa = citrulline
GKLYGIXDVXSTRDR

SEQ ID NO: 1287 - protein, 20 aa, Homo sapiens
  antigenic epitope associated with a disorder and recognized by specific TCR
  VARIANT 1, 14: Xaa = citrulline
XCILPATIKAEFVXAETPYM

SEQ ID NO: 1288 - protein, 20 aa, Homo sapiens
  antigenic epitope associated with a disorder and recognized by specific TCR
  VARIANT 1, 12, 15: Xaa = citrulline
XCILPGKLYGIXDVXSTRDR

SEQ ID NO: 1289 - protein, 13 aa, Homo sapiens
  antigenic epitope associated with a disorder and recognized by specific TCR
AGFKGEQGPKGEP

SEQ ID NO: 1290 - protein, 14 aa, Homo sapiens
  antigenic epitope associated with a disorder and recognized by specific TCR
  VARIANT 5: Xaa = citrulline
APGNXGFPGQDLAG

SEQ ID NO: 1291 - protein, 12 aa, Homo sapiens
  antigenic epitope associated with a disorder and recognized by specific TCR
GYRARPAKAAAT

SEQ ID NO: 1292 - protein, 15 aa, Homo sapiens
  antigenic epitope associated with a disorder and recognized by specific TCR
  VARIANT 7: Xaa = citrulline
YAEYHFXVGSEAEGY

SEQ ID NO: 1293 - protein, 13 aa, Homo sapiens
  antigenic epitope associated with a disorder and recognized by specific TCR
GHWTSESSVSGST

SEQ ID NO: 1294 - protein, 13 aa, Homo sapiens
  antigenic epitope associated with a disorder and recognized by specific TCR
  VARIANT 6: Xaa = citrulline
QDFTNXINKLKNS

SEQ ID NO: 1295 - protein, 15 aa, Homo sapiens
  antigenic epitope associated with a disorder and recognized by specific TCR
  VARIANT 7: Xaa = citrulline
GGGYRAXPAKAAATQ

SEQ ID NO: 1296 - protein, 14 aa, Homo sapiens
  antigenic epitope associated with a disorder and recognized by specific TCR
  VARIANT 1, 7, 10: Xaa = citrulline
XFGYRAXPAXAAAT

SEQ ID NO: 1297 - protein, 17 aa, Homo sapiens
  antigenic epitope associated with a disorder and recognized by specific TCR
MAQGTLIRVTPEQPTHA

SEQ ID NO: 1298 - protein, 18 aa, Homo sapiens
  antigenic epitope associated with a disorder and recognized by specific TCR
ASPGVVVDIAHSPPAKKK

SEQ ID NO: 1299 - protein, 16 aa, Homo sapiens
  antigenic epitope associated with a disorder and recognized by specific TCR
LTMKAASGSTGDQKVQ

SEQ ID NO: 1300 - protein, 12 aa, Homo sapiens
  antigenic epitope associated with a disorder and recognized by specific TCR
ISYYGPKTPPVK

SEQ ID NO: 1301 - protein, 15 aa, Homo sapiens
  antigenic epitope associated with a disorder and recognized by specific TCR
IGYIQAPHKTLPVVF

SEQ ID NO: 1302 - protein, 12 aa, Homo sapiens
  antigenic epitope associated with a disorder and recognized by specific TCR
RGPQTGGISGLD

SEQ ID NO: 1303 - protein, 17 aa, Homo sapiens
  antigenic epitope associated with a disorder and recognized by specific TCR
QALQDFLSAQQVQAPVK

SEQ ID NO: 1304 - protein, 18 aa, Homo sapiens
  antigenic epitope associated with a disorder and recognized by specific TCR
VGHVDEFLSFVPAPDRKG

SEQ ID NO: 1305 - protein, 20 aa, Homo sapiens
  antigenic epitope associated with a disorder and recognized by specific TCR
GVYATRSSAVRLRSSVPGVR

SEQ ID NO: 1306 - protein, 13 aa, Homo sapiens
  antigenic epitope associated with a disorder and recognized by specific TCR
SSLNLRETNLDSL

SEQ ID NO: 1307 - protein, 15 aa, Homo sapiens
  antigenic epitope associated with a disorder and recognized by specific TCR
  VARIANT 7, 12: Xaa = citrulline
GGVYATXSSAVXLRS

SEQ ID NO: 1308 - protein, 20 aa, Homo sapiens
  antigenic epitope associated with a disorder and recognized by specific TCR
  VARIANT 6, 11, 13: Xaa = citrulline
GVYATXSSAVXLXSSVPGVR

SEQ ID NO: 1309 - protein, 13 aa, Homo sapiens
  antigenic epitope associated with a disorder and recognized by specific TCR
  VARIANT 6: Xaa = citrulline
SSLNLXETNLDSL

SEQ ID NO: 1310 - protein, 15 aa, Homo sapiens
  antigenic epitope associated with a disorder and recognized by specific TCR
TSKGLFRAAVPSGAS

SEQ ID NO: 1311 - protein, 15 aa, Homo sapiens
  antigenic epitope associated with a disorder and recognized by specific TCR
VIGMDVAASEFFRSG

SEQ ID NO: 1312 - protein, 15 aa, Homo sapiens
  antigenic epitope associated with a disorder and recognized by specific TCR
KAKFAGRNFRNPLAK

SEQ ID NO: 1313 - protein, 15 aa, Homo sapiens
  antigenic epitope associated with a disorder and recognized by specific TCR
KRIAKAVNEKSCNCL

SEQ ID NO: 1314 - protein, 15 aa, Homo sapiens
  antigenic epitope associated with a disorder and recognized by specific TCR
MSILKIHAREIFDSR

SEQ ID NO: 1315 - protein, 15 aa, Homo sapiens
  antigenic epitope associated with a disorder and recognized by specific TCR
KRIAKAVNEKSCNCL

SEQ ID NO: 1316 - protein, 15 aa, Homo sapiens
  antigenic epitope associated with a disorder and recognized by specific TCR
IFDSRGNPTVEVDLF

SEQ ID NO: 1317 - protein, 15 aa, Homo sapiens
  antigenic epitope associated with a disorder and recognized by specific TCR
KRIAKAVNEKSCNCL

SEQ ID NO: 1318 - protein, 15 aa, Homo sapiens
  antigenic epitope associated with a disorder and recognized by specific TCR
  VARIANT 7: Xaa = citrulline
TSKGLFXAAVPSGAS

SEQ ID NO: 1319 - protein, 15 aa, Homo sapiens
  antigenic epitope associated with a disorder and recognized by specific TCR
  VARIANT 13: Xaa = citrulline
VIGMDVAASEFFXSG

SEQ ID NO: 1320 - protein, 15 aa, Homo sapiens
  antigenic epitope associated with a disorder and recognized by specific TCR
  VARIANT 7, 10: Xaa = citrulline
KAKFAGXNFXNPLAK

SEQ ID NO: 1321 - protein, 15 aa, Homo sapiens
  antigenic epitope associated with a disorder and recognized by specific TCR
  VARIANT 2: Xaa = citrulline
KXIAKAVNEKSCNCL

SEQ ID NO: 1322 - protein, 15 aa, Homo sapiens
  antigenic epitope associated with a disorder and recognized by specific TCR
  VARIANT 5: Xaa = citrulline
IFDSXGNPTVEDVLF

SEQ ID NO: 1323 - protein, 15 aa, Homo sapiens
  antigenic epitope associated with a disorder and recognized by specific TCR
  VARIANT 2: Xaa = citrulline
KXIAKAVNEKSCNCL

SEQ ID NO: 1324 - protein, 15 aa, Homo sapiens
  antigenic epitope associated with a disorder and recognized by specific TCR
  VARIANT 5: Xaa = citrulline
IFDSXGNPTVEVDLF

SEQ ID NO: 1325 - protein, 15 aa, Homo sapiens
  antigenic epitope associated with a disorder and recognized by specific TCR
  VARIANT 2: Xaa = citrulline
KXIAKAVNEKSCNCL

SEQ ID NO: 1326 - protein, 19 aa, Homo sapiens
  antigenic epitope associated with a disorder and recognized by specific TCR
WVPLEIMIKFNRLNRLTTD

SEQ ID NO: 1327 - protein, 18 aa, Homo sapiens
  antigenic epitope associated with a disorder and recognized by specific TCR
FNRLNRLTTDFNVIVEAL

SEQ ID NO: 1328 - protein, 18 aa, Homo sapiens
  antigenic epitope associated with a disorder and recognized by specific TCR
QEAKQKLEEDAEMKSLEE

SEQ ID NO: 1329 - protein, 18 aa, Homo sapiens
  antigenic epitope associated with a disorder and recognized by specific TCR
EALKKIIEDQQESLNKWK

SEQ ID NO: 1330 - protein, 18 aa, Homo sapiens
  antigenic epitope associated with a disorder and recognized by specific TCR
KGSIFVVFDSIESAKKFV

SEQ ID NO: 1331 - protein, 15 aa, Homo sapiens
  antigenic epitope associated with a disorder and recognized by specific TCR
SVKLVRFLMKLSHET

SEQ ID NO: 1332 - protein, 15 aa, Homo sapiens
  antigenic epitope associated with a disorder and recognized by specific TCR
EPVQLETLSIRGNNI

SEQ ID NO: 1333 - protein, 20 aa, Homo sapiens
  antigenic epitope associated with a disorder and recognized by specific TCR
YVVKSFDRSTKVIDFHYPNE

SEQ ID NO: 1334 - protein, 17 aa, Homo sapiens
  antigenic epitope associated with a disorder and recognized by specific TCR
AMMIARFKMFPEVKEKG

SEQ ID NO: 1335 - protein, 20 aa, Homo sapiens
  antigenic epitope associated with a disorder and recognized by specific TCR
MASPGSGFWSFGSEDGSGDS

SEQ ID NO: 1336 - protein, 20 aa, Homo sapiens
  antigenic epitope associated with a disorder and recognized by specific TCR
CACDQKPCSCSKVDVNYAFL

SEQ ID NO: 1337 - protein, 20 aa, Homo sapiens
  antigenic epitope associated with a disorder and recognized by specific TCR
RPTLAFLQDVMNILLQYVVK

SEQ ID NO: 1338 - protein, 20 aa, Homo sapiens
  antigenic epitope associated with a disorder and recognized by specific TCR
DVMNILLQYVVKSFDRSTKV

SEQ ID NO: 1339 - protein, 20 aa, Homo sapiens
  antigenic epitope associated with a disorder and recognized by specific TCR
NTNMFTYEIAPVFVLLEYVT

SEQ ID NO: 1340 - protein, 20 aa, Homo sapiens
  antigenic epitope associated with a disorder and recognized by specific TCR
KGMAALPRLIAFTSEHSHFS

SEQ ID NO: 1341 - protein, 20 aa, Homo sapiens
  antigenic epitope associated with a disorder and recognized by specific TCR
LIAFTSEHSHFSLKKGAAAL

SEQ ID NO: 1342 - protein, 20 aa, Homo sapiens
  antigenic epitope associated with a disorder and recognized by specific TCR
DSVILIKCDERGKMIPSDLE

SEQ ID NO: 1343 - protein, 20 aa, Homo sapiens
  antigenic epitope associated with a disorder and recognized by specific TCR
DERGKMIPSDLERRILEAKQ

SEQ ID NO: 1344 - protein, 20 aa, Homo sapiens
  antigenic epitope associated with a disorder and recognized by specific TCR
EAKQKGFVPFLVSATAGTTV

SEQ ID NO: 1345 - protein, 20 aa, Homo sapiens
  antigenic epitope associated with a disorder and recognized by specific TCR
ICKKYKIWMHVDAAWGGGLL

SEQ ID NO: 1346 - protein, 20 aa, Homo sapiens
  antigenic epitope associated with a disorder and recognized by specific TCR
GGLLMSRKHKWKLSGVERAN

SEQ ID NO: 1347 - protein, 20 aa, Homo sapiens
  antigenic epitope associated with a disorder and recognized by specific TCR
HKWKLSGVERANSVTWNPHK

SEQ ID NO: 1348 - protein, 20 aa, Homo sapiens
  antigenic epitope associated with a disorder and recognized by specific TCR
YDLSYDTGDKALQCGRHVDV

SEQ ID NO: 1349 - protein, 20 aa, Homo sapiens
  antigenic epitope associated with a disorder and recognized by specific TCR
KCLELAEYLYNIIKNREGYE

SEQ ID NO: 1350 - protein, 20 aa, Homo sapiens
  antigenic epitope associated with a disorder and recognized by specific TCR
VSYQPLGDKVNFFRMVISNP

SEQ ID NO: 1351 - protein, 20 aa, Homo sapiens
  antigenic epitope associated with a disorder and recognized by specific TCR
KVNFFRMVISNPAATHQDID

SEQ ID NO: 1352 - protein, 28 aa, Homo sapiens
  antigenic epitope associated with a disorder and recognized by specific TCR
LAKEWQALCAYQAEPNTCATAQGEGNIK

SEQ ID NO: 1353 - protein, 15 aa, Homo sapiens
  antigenic epitope associated with a disorder and recognized by specific TCR
GASSSLSPLQAELLP

SEQ ID NO: 1354 - protein, 15 aa, Homo sapiens
  antigenic epitope associated with a disorder and recognized by specific TCR
FQDSGLLYLAQELPA

SEQ ID NO: 1355 - protein, 17 aa, Homo sapiens
  antigenic epitope associated with a disorder and recognized by specific TCR
RSDYINASPIIEHDPRM

SEQ ID NO: 1356 - protein, 16 aa, Homo sapiens
  antigenic epitope associated with a disorder and recognized by specific TCR
DQFEFALTAVAEEVNA

SEQ ID NO: 1357 - protein, 15 aa, Homo sapiens
  antigenic epitope associated with a disorder and recognized by specific TCR
QEPSQLISLEEENQR

SEQ ID NO: 1358 - protein, 15 aa, Homo sapiens
  antigenic epitope associated with a disorder and recognized by specific TCR
LYHFLQIPTHEEHLF

SEQ ID NO: 1359 - protein, 14 aa, Homo sapiens
  antigenic epitope associated with a disorder and recognized by specific TCR
LVEALYLVCGERGF

SEQ ID NO: 1360 - protein, 15 aa, Homo sapiens
  antigenic epitope associated with a disorder and recognized by specific TCR
GLSGLELDGMAELMA

SEQ ID NO: 1361 - protein, 15 aa, Homo sapiens
  antigenic epitope associated with a disorder and recognized by specific TCR
AKMYAFTLESVELQQ

SEQ ID NO: 1362 - protein, 20 aa, Homo sapiens
  antigenic epitope associated with a disorder and recognized by specific TCR
VRREIAKALSKSFTMHSLTI

SEQ ID NO: 1363 - protein, 16 aa, Homo sapiens
  antigenic epitope associated with a disorder and recognized by specific TCR
  VARIANT 6, 11: Xaa = citrulline
IVFHYXAISTXYTLDF

SEQ ID NO: 1364 - protein, 13 aa, Homo sapiens
  antigenic epitope associated with a disorder and recognized by specific TCR
  VARIANT 6: Xaa = citrulline
SSLNLXETNLDSL

SEQ ID NO: 1365 - protein, 15 aa, Homo sapiens
  antigenic epitope associated with a disorder and recognized by specific TCR
  VARIANT 2: Xaa = citrulline
KXIAKAVNEKSCNCL

SEQ ID NO: 1366 - protein, 15 aa, Homo sapiens
  antigenic epitope associated with a disorder and recognized by specific TCR
  VARIANT 9: Xaa = citrulline
ATIKAEFVXAETPYM

SEQ ID NO: 1367 - protein, 15 aa, Homo sapiens
  antigenic epitope associated with a disorder and recognized by specific TCR
  VARIANT 9: Xaa = citrulline
ATIKAEFVXAETPYM

SEQ ID NO: 1368 - protein, 20 aa, Homo sapiens
  antigenic epitope associated with a disorder and recognized by specific TCR
  VARIANT 11, 16: Xaa = citrulline
GYEQCDAGWLXDQTVXYPIV

SEQ ID NO: 1369 - protein, 18 aa, Homo sapiens
  antigenic epitope associated with a disorder and recognized by specific TCR
  VARIANT 4, 9: Xaa = citrulline
PGVXTYGVXPSTETYDVY

SEQ ID NO: 1370 - protein, 17 aa, Homo sapiens
  antigenic epitope associated with a disorder and recognized by specific TCR
  VARIANT 13: Xaa = citrulline
KCYAGWLADGSLXYPIV

SEQ ID NO: 1371 - protein, 20 aa, Homo sapiens
  antigenic epitope associated with a disorder and recognized by specific TCR
QLYHFLQIPTHEEHLFYVLS

SEQ ID NO: 1372 - protein, 20 aa, Homo sapiens
  antigenic epitope associated with a disorder and recognized by specific TCR
KWCANPDWIHIDTTPFAGLV

SEQ ID NO: 1373 - protein, 20 aa, Homo sapiens
  antigenic epitope associated with a disorder and recognized by specific TCR
QLYHFLQIPTHEEHLFYVLS

SEQ ID NO: 1374 - protein, 20 aa, Homo sapiens
  antigenic epitope associated with a disorder and recognized by specific TCR
QLYHFLQIPTHEEHLFYVLS

SEQ ID NO: 1375 - protein, 15 aa, Homo sapiens
  antigenic epitope associated with a disorder and recognized by specific TCR
SLQPLALEGSLQKRG

SEQ ID NO: 1376 - protein, 20 aa, Homo sapiens
  antigenic epitope associated with a disorder and recognized by specific TCR
IRYFILPDSLPLDTLLVDVE

SEQ ID NO: 1377 - protein, 15 aa, Homo sapiens
  CDR3 alpha of TCR that specifically recognizes antigen associated with a disorder
CALSNDMEYGNKLVF

SEQ ID NO: 1378 - protein, 12 aa, Homo sapiens
  CDR3 alpha of TCR that specifically recognizes antigen associated with a disorder
CAFGGATNKLIF

SEQ ID NO: 1379 - protein, 13 aa, Homo sapiens
  CDR3 alpha of TCR that specifically recognizes antigen associated with a disorder
CAVLYGGSEKLVF

SEQ ID NO: 1380 - protein, 14 aa, Homo sapiens
  CDR3 alpha of TCR that specifically recognizes antigen associated with a disorder
CAENKVSDGQKLLF

SEQ ID NO: 1381 - protein, 12 aa, Homo sapiens
  CDR3 alpha of TCR that specifically recognizes antigen associated with a disorder
CLVGEYGNKLVF

SEQ ID NO: 1382 - protein, 15 aa, Homo sapiens
  CDR3 alpha of TCR that specifically recognizes antigen associated with a disorder
CAASKGSSNTGKLIF

SEQ ID NO: 1383 - protein, 14 aa, Homo sapiens
  CDR3 alpha of TCR that specifically recognizes antigen associated with a disorder
CAYRGSNQGGKLIF

SEQ ID NO: 1384 - protein, 12 aa, Homo sapiens
  CDR3 alpha of TCR that specifically recognizes antigen associated with a disorder
CALHGGSYIPTF

SEQ ID NO: 1385 - protein, 14 aa, Homo sapiens
  CDR3 alpha of TCR that specifically recognizes antigen associated with a disorder
CAATRTSGTYKYIF

SEQ ID NO: 1386 - protein, 15 aa, Homo sapiens
  CDR3 alpha of TCR that specifically recognizes antigen associated with a disorder
CAVEDLNQAGTALIF

SEQ ID NO: 1387 - protein, 12 aa, Homo sapiens
  CDR3 alpha of TCR that specifically recognizes antigen associated with a disorder
CAGQTGANNLFF

SEQ ID NO: 1388 - protein, 16 aa, Homo sapiens
  CDR3 alpha of TCR that specifically recognizes antigen associated with a disorder
CILRDTISNFGNEKTF

SEQ ID NO: 1389 - protein, 14 aa, Homo sapiens
  CDR3 alpha of TCR that specifically recognizes antigen associated with a disorder
CVVSVKAAGNKLTF

SEQ ID NO: 1390 - protein, 14 aa, Homo sapiens
  CDR3 alpha of TCR that specifically recognizes antigen associated with a disorder
CALSAEAGGFKTIF

SEQ ID NO: 1391 - protein, 21 aa, Homo sapiens
  CDR3 beta of TCR that specifically recognizes antigen associated with a disorder
CASSLIPFLAGVLANYNEQFF

SEQ ID NO: 1392 - protein, 15 aa, Homo sapiens
  CDR3 beta of TCR that specifically recognizes antigen associated with a disorder
CASSLSGNSNQPQHF

SEQ ID NO: 1393 - protein, 13 aa, Homo sapiens
  CDR3 beta of TCR that specifically recognizes antigen associated with a disorder
CAWSVRGDQPQHF

SEQ ID NO: 1394 - protein, 15 aa, Homo sapiens
  CDR3 beta of TCR that specifically recognizes antigen associated with a disorder
CASRPGTINQETQYF

SEQ ID NO: 1395 - protein, 15 aa, Homo sapiens
  CDR3 beta of TCR that specifically recognizes antigen associated with a disorder
CASSSNPRDNYGYTF

SEQ ID NO: 1396 - protein, 15 aa, Homo sapiens
  CDR3 beta of TCR that specifically recognizes antigen associated with a disorder
CASKFPWGAVGELFF

SEQ ID NO: 1397 - protein, 17 aa, Homo sapiens
  CDR3 beta of TCR that specifically recognizes antigen associated with a disorder
CAITPGQGAKGGETQYF

SEQ ID NO: 1398 - protein, 18 aa, Homo sapiens
  CDR3 beta of TCR that specifically recognizes antigen associated with a disorder
CASSYRLMGSGSRETQYF

SEQ ID NO: 1399 - protein, 16 aa, Homo sapiens
  CDR3 beta of TCR that specifically recognizes antigen associated with a disorder
CASSPWGAGGTDTQYF

SEQ ID NO: 1400 - protein, 15 aa, Homo sapiens
  CDR3 beta of TCR that specifically recognizes antigen associated with a disorder
CASSLALGQGNQQFF

SEQ ID NO: 1401 - protein, 17 aa, Homo sapiens
  CDR3 beta of TCR that specifically recognizes antigen associated with a disorder
CASSQEVGTVPNQPQHF

SEQ ID NO: 1402 - protein, 14 aa, Homo sapiens
  CDR3 beta of TCR that specifically recognizes antigen associated with a disorder
CASSFGSSYYGYTF

SEQ ID NO: 1403 - protein, 15 aa, Homo sapiens
  CDR3 beta of TCR that specifically recognizes antigen associated with a disorder
CASSQTGTDGYEQFF

SEQ ID NO: 1404 - protein, 12 aa, Homo sapiens
  CDR3 beta of TCR that specifically recognizes antigen associated with a disorder
CSAKGQPRGAFF

SEQ ID NO: 1405 - DNA, 20 bp, Artificial Sequence
  gRNA_1  (human TRAC editing)
tctctcagctggtacacggc

SEQ ID NO: 1406 - DNA, 20 bp, Artificial Sequence
  gRNA_4 (human TRAC editing)
gagaatcaaaatcggtgaat

SEQ ID NO: 1407 - DNA, 6508 bp, Artificial Sequence
  AAV FOXP3 ex1.MND-LNGFRki (FOXP3 editing)
gtagaaaagatcaaaggatcttcttgagatcctttttttctgcgcgtaatctgctgcttgcaaacaaaaaaaccaccgctaccagcggtggtttgtttgccggatcaagagctaccaactctttttccgaaggtaactggcttcagcagagcgcagataccaaatactgtccttctagtgtagccgtagttaggccaccacttcaagaactctgtagcaccgcctacatacctcgctctgctaatcctgttaccagtggctgctgccagtggcgataagtcgtgtcttaccgggttggactcaagacgatagttaccggataaggcgcagcggtcgggctgaacggggggttcgtgcacacagcccagcttggagcgaacgacctacaccgaactgagatacctacagcgtgagctatgagaaagcgccacgcttcccgaagggagaaaggcggacaggtatccggtaagcggcagggtcggaacaggagagcgcacgagggagcttccagggggaaacgcctggtatctttatagtcctgtcgggtttcgccacctctgacttgagcgtcgatttttgtgatgctcgtcaggggggcggagcctatggaaaaacgccagcaacgcggcctttttacggttcctggccttttgctggccttttgctcacatgttctttcctgcgttatcccctgattctgtggataaccgtattaccgcctttgagtgagctgataccgctcgccgcagccgaacgaccgagcgcagcgagtcagtgagcgaggaagcggaagagcgcccaatacgcaaaccgcctctccccgcgcgttggccgattcattaatgcagctgcgcgctcgctcgctcactgaggccgcccgggcaaagcccgggcgtcgggcgacctttggtcgcccggcctcagtgagcgagcgagcgcgcagagagggagtggccaactccatcactaggggttccttgtagttaatgattaacccgccatgctacttatctacgtagcggccgcatcacttgccaggactgttacaatagcctcctcactagccccactcacagcagccagatgaatcttttgagtccatgcctagtcactggggcaaaataggactccgaggagaaagtccgagaccagctccggcaagatgagcaaacacagcctgtgcagggtgcagggagggctagaggcctgaggcttgaaacagctctcaagtggagggggaaacaaccattgccctcatagaggacacatccacaccagggctgtgctagcgtgggcaggcaagccaggtgctggacctctgcacgtggggcatgtgtgggtatgtacatgtacctgtgttcttggtgtgtgtgtgtgtgtgtgtgtgtgtgtgtgtctagagctggggtgcaactatggggcccctcgggacatgtcccagccaatgcctgctttgaccagaggagtgtccacgtggctcaggtggtcgagtatctcataccgccctagcacacgtgtgactcctttcccctattgtctacgcagcctgcccttggacaaggacccgatgcccaaccccaggcctggcaagccctcggccccttccttggcccttggcccatccccacgcgtaggaacagagaaacaggagaatatgggccaaacaggatatctgtggtaagcagttcctgccccggctcagggccaagaacagttggaacagcagaatatgggccaaacaggatatctgtggtaagcagttcctgccccggctcagggccaagaacagatggtccccagatgcggtcccgccctcagcagtttctagagaaccatcagatgtttccagggtgccccaaggacctgaaatgaccctgtgccttatttgaactaaccaatcagttcgcttctcgcttctgttcgcgcgcttctgctccccgagctctatataagcagagctcgtttagtgaaccgtcagatcgcctggagacgccatccacgctgttttgacttccatagaaggatctcgaggccaccatgggggcaggtgccaccggacgagccatggacgggccgcgcctgctgctgttgctgcttctgggggtgtcccttggaggtgccaaggaggcatgccccacaggcctgtacacacacagcggtgagtgctgcaaagcctgcaacctgggcgagggtgtggcccagccttgtggagccaaccagaccgtgtgtgagccctgcctggacagcgtgacgttctccgacgtggtgagcgcgaccgagccgtgcaagccgtgcaccgagtgcgtggggctccagagcatgtcggcgccgtgcgtggaggccgacgacgccgtgtgccgctgcgcctacggctactaccaggatgagacgactgggcgctgcgaggcgtgccgcgtgtgcgaggcgggctcgggcctcgtgttctcctgccaggacaagcagaacaccgtgtgcgaggagtgccccgacggcacgtattccgacgaggccaaccacgtggacccgtgcctgccctgcaccgtgtgcgaggacaccgagcgccagctccgcgagtgcacacgctgggccgacgccgagtgcgaggagatccctggccgttggattacacggtccacacccccagagggctcggacagcacagcccccagcacccaggagcctgaggcacctccagaacaagacctcatagccagcacggtggcaggtgtggtgaccacagtgatgggcagctcccagcccgtggtgacccgaggcaccaccgacaacctcatccctgtctattgctccatcctggctgctgtggttgtgggtcttgtggcctacatagccttcaagaggggaagcggagcgactaacttcagcctgctgaagcaggccggagatgtggaggaaaaccctggaccgatgcccaaccccaggcctggcaagccctcggccccttccttggcccttggcccatctcctggtgcatcgcccagctggagggctgcccctaaagcaagcgacctgctgggggcccggggcccgggtggcacgttccagggccgagatcttcgaggcggggcccatgcctcctcttcttccttgaaccccatgccaccatcgcagctgcaggtgaggccctgggcccaggatggggcaggcagggtggggtacctggacctacaggtgccgacctttactgtggcactgggcgggaggggggctggctggggcacaggaagtggtttctgggtcccaggcaagtctgtgacttatgcagatgttgcagggccaagaaaatccccacctgccaggcctcagagattggaggctctccccgacctcccaatccctgtctcaggagaggaggaggccgtattgtagtcccatgagcatagctatgtgtccccatccccatgtgacaagagaagaggactggggccaagtaggtgaggtgacagggctgaggccagctctgcaacttattagctgtttgatctttaaaaagttactcgatctccatgagcctcagtttccatacgtgtaaaagggggatgatcatagcatctaccatgtgggcttgcaggatcctacgtagataagtagcatggcgggttaatcattaactacaaggaacccctagtgatggagttggccactccctctctgcgcgctcgctcgctcactgaggccgggcgaccaaaggtcgcccgacgcccgggctttgcccgggcggcctcagtgagcgagcgagcgcgccagctggcgtaatagcgaagaggcccgcaccgatcgcccttcccaacagttgcgcagcctgaatggcgaatggcgattccgttgcaatggctggcggtaatattgttctggatattaccagcaaggccgatagtttgagttcttctactcaggcaagtgatgttattactaatcaaagaagtattgcgacaacggttaatttgcgtgatggacagactcttttactcggtggcctcactgattataaaaacacttctcaggattctggcgtaccgttcctgtctaaaatccctttaatcggcctcctgtttagctcccgctctgattctaacgaggaaagcacgttatacgtgctcgtcaaagcaaccatagtacgcgccctgtagcggcgcattaagcgcggcgggtgtggtggttacgcgcagcgtgaccgctacacttgccagcgccctagcgcccgctcctttcgctttcttcccttcctttctcgccacgttcgccggctttccccgtcaagctctaaatcgggggctccctttagggttccgatttagtgctttacggcacctcgaccccaaaaaacttgattagggtgatggttcacgtagtgggccatcgccctgatagacggtttttcgccctttgacgttggagtccacgttctttaatagtggactcttgttccaaactggaacaacactcaaccctatctcggtctattcttttgatttataagggattttgccgatttcggcctattggttaaaaaatgagctgatttaacaaaaatttaacgcgaattttaacaaaatattaacgtttacaatttaaatatttgcttatacaatcttcctgtttttggggcttttctgattatcaaccggggtacatatgattgacatgctagttttacgattaccgttcatcgattctcttgtttgctccagactctcaggcaatgacctgatagcctttgtagagacctctcaaaaatagctaccctctccggcatgaatttatcagctagaacggttgaatatcatattgatggtgatttgactgtctccggcctttctcacccgtttgaatctttacctacacattactcaggcattgcatttaaaatatatgagggttctaaaaatttttatccttgcgttgaaataaaggcttctcccgcaaaagtattacagggtcataatgtttttggtacaaccgatttagctttatgctctgaggctttattgcttaattttgctaattctttgccttgcctgtatgatttattggatgttggaatcgcctgatgcggtattttctccttacgcatctgtgcggtatttcacaccgcatatggtgcactctcagtacaatctgctctgatgccgcatagttaagccagccccgacacccgccaacacccgctgacgcgccctgacgggcttgtctgctcccggcatccgcttacagacaagctgtgaccgtctccgggagctgcatgtgtcagaggttttcaccgtcatcaccgaaacgcgcgagacgaaagggcctcgtgatacgcctatttttataggttaatgtcatgataataatggtttcttagacgtcaggtggcacttttcggggaaatgtgcgcggaacccctatttgtttatttttctaaatacattcaaatatgtatccgctcatgagacaataaccctgataaatgcttcaataatattgaaaaaggaagagtatgagtattcaacatttccgtgtcgcccttattcccttttttgcggcattttgccttcctgtttttgctcacccagaaacgctggtgaaagtaaaagatgctgaagatcagttgggtgcacgagtgggttacatcgaactggatctcaacagcggtaagatccttgagagttttcgccccgaagaacgttttccaatgatgagcacttttaaagttctgctatgtggcgcggtattatcccgtattgacgccgggcaagagcaactcggtcgccgcatacactattctcagaatgacttggttgagtactcaccagtcacagaaaagcatcttacggatggcatgacagtaagagaattatgcagtgctgccataaccatgagtgataacactgcggccaacttacttctgacaacgatcggaggaccgaaggagctaaccgcttttttgcacaacatgggggatcatgtaactcgccttgatcgttgggaaccggagctgaatgaagccataccaaacgacgagcgtgacaccacgatgcctgtagcaatggcaacaacgttgcgcaaactattaactggcgaactacttactctagcttcccggcaacaattaatagactggatggaggcggataaagttgcaggaccacttctgcgctcggcccttccggctggctggtttattgctgataaatctggagccggtgagcgtgggtctcgcggtatcattgcagcactggggccagatggtaagccctcccgtatcgtagttatctacacgacggggagtcaggcaactatggatgaacgaaatagacagatcgctgagataggtgcctcactgattaagcattggtaactgtcagaccaagtttactcatatatactttagattgatttaaaacttcatttttaatttaaaaggatctaggtgaagatcctttttgataatctcatgaccaaaatcccttaacgtgagttttcgttccactgagcgtcagacccc

SEQ ID NO: 1408 - protein, 13 aa, Artificial Sequence
  target epitope for TCR
  VARIANT 6: Xaa = citrulline
SSLNLXETNLDSL

SEQ ID NO: 1409 - protein, 16 aa, Artificial sequence
  target epitope for TCR
  VARIANT 6, 11: Xaa = citrulline
IVFHYXAISTXYTLDF

SEQ ID NO: 1410 - protein, 20 aa, Artificial Sequence
  target epitope for TCR
  VARIANT 11, 16: Xaa = citrulline
GYEQCDAGWLXDQTVXYPIV

SEQ ID NO: 1411 - protein, 18 aa, Artificial Sequence
  target epitope for TCR
  VARIANT 4, 9: Xaa = citrulline
PGVXTYGVXPSTETYDVY

SEQ ID NO: 1412 - protein, 17 aa, Artificial Sequence
  target epitope for TCR
  VARIANT 13: Xaa = citrulline
KCYAGWLADGSLXYPIV

SEQ ID NO: 1413 - protein, 15 aa, Artificial Sequence
  target epitope for TCR
  VARIANT 9: Xaa = citrulline
ATIKAEFVXAETPYM

SEQ ID NO: 1414 - protein, 15 aa, Artificial Sequence
  target epitope for TCR
  VARIANT 9: Xaa = citrulline
ATIKAEFVXAETPYM

SEQ ID NO: 1415 - protein, 15 aa, Artificial Sequence
  target epitope for TCR
  VARIANT 2: Xaa = citrulline
KXIAKAVNEKSCNCL

SEQ ID NO: 1416 - DNA, 8914 bp, Artificial Sequence
  lentiviral vector expressing A2CAR.P2A and truncated LNGFR
agcttaatgtagtcttatgcaatactcttgtagtcttgcaacatggtaacgatgagttagcaacatgccttacaaggagagaaaaagcaccgtgcatgccgattggtggaagtaaggtggtacgatcgtgccttattaggaaggcaacagacgggtctgacatggattggacgaaccactgaattgccgcattgcagagatattgtatttaagtgcctagctcgatacaataaacgggtctctctggttagaccagatctgagcctgggagctctctggctaactagggaacccactgcttaagcctcaataaagcttgccttgagtgcttcaagtagtgtgtgcccgtctgttgtgtgactctggtaactagagatccctcagacccttttagtcagtgtggaaaatctctagcagtggcgcccgaacagggacctgaaagcgaaagggaaaccagagctctctcgacgcaggactcggcttgctgaagcgcgcacggcaagaggcgaggggcggcgactggtgagtacgccaaaaattttgactagcggaggctagaaggagagagatgggtgcgagagcgtcagtattaagcgggggagaattagatcgcgatgggaaaaaattcggttaaggccagggggaaagaaaaaatataaattaaaacatatagtatgggcaagcagggagctagaacgattcgcagttaatcctggcctgttagaaacatcagaaggctgtagacaaatactgggacagctacaaccatcccttcagacaggatcagaagaacttagatcattatataatacagtagcaaccctctattgtgtgcatcaaaggatagagataaaagacaccaaggaagctttagacaagatagaggaagagcaaaacaaaagtaagaccaccgcacagcaagcggacgctgatcttcagacctggaggaggagatatgagggacaattggagaagtgaattatataaatataaagtagtaaaaattgaaccattaggagtagcacccaccaaggcaaagagaagagtggtgcagagagaaaaaagagcagtgggaataggagctttgttccttgggttcttgggagcagcaggaagcactatgggcgcagcctcaatgacgctgacggtacaggccagacaattattgtctggtatagtgcagcagcagaacaatttgctgagggctattgaggcgcaacagcatctgttgcaactcacagtctggggcatcaagcagctccaggcaagaatcctggctgtggaaagatacctaaaggatcaacagctcctggggatttggggttgctctggaaaactcatttgcaccactgctgtgccttggaatgctagttggagtaataaatctctggaacagatttggaatcacacgacctggatggagtgggacagagaaattaacaattacacaagcttaatacactccttaattgaagaatcgcaaaaccagcaagaaaagaatgaacaagaattattggaattagataaatgggcaagtttgtggaattggtttaacataacaaattggctgtggtatataaaattattcataatgatagtaggaggcttggtaggtttaagaatagtttttgctgtactttctatagtgaatagagttaggcagggatattcaccattatcgtttcagacccacctcccaaccccgaggggacccgacaggcccgaaggaatagaagaagaaggtggagagagagacagagacagatccattcgattagtgaacggatctcgacggtatcggttaacttttaaaagaaaaggggggattggggggtacagtgcaggggaaagaatagtagacataatagcaacagacatacaaactaaagaattacaaaaacaaattacaaaaattcaaaattttatcgattacgcgtaggaacagagaaacaggagaatatgggccaaacaggatatctgtggtaagcagttcctgccccggctcagggccaagaacagttggaacagcagaatatgggccaaacaggatatctgtggtaagcagttcctgccccggctcagggccaagaacagatggtccccagatgcggtcccgccctcagcagtttctagagaaccatcagatgtttccagggtgccccaaggacctgaaatgaccctgtgccttatttgaactaaccaatcagttcgcttctcgcttctgttcgcgcgcttctgctccccgagctctatataagcagagctcgtttagtgaaccgtcagatcgcctggagacgccatccacgctgttttgacttccatagaaggatctcgaggccgccaccatggctctgcctgtgacagctctgctgctgcctctggccctgctgctccatgccgccagacccggatcccaggtacagctcgttcaatctggggctgaagtaaaaaagcctggagcgtctgtaaaggtatcttgcaaagcgagcggctacacattcacaagttatcacatccaatgggtgagacaggccccaggacaacgcttggagtggatggggtggatttaccctggcgacggcagcacacagtacaatgagaaatttaaaggccgggtgactatcactcgggacacctccgccagcacggcttatatggagcttagcagtttgagatccgaagatacagcggtatattactgcgcgagagaaggaacgtactacgctatggactattggggtcagggcacaaccgttacagtctcctctgtggacagctccggaggtgggggttcaggagggggtggaagcggtggtggtggcagtacaagcgatatagtaatgacccaaaccccgctctctctgagcgtcacgccaggacaaccagcatcaatctcttgccgcagtagtcaatccatcgttcactctaatggaaacacataccttgagtggtatcttcagaaaccaggtcagagccctcagctcctcatctataaagtctctaaccggttctcaggtgttccggaccggttcagtggttccggctcaggaacagacttcaccttgaagatcagtcgagtagaagccgaagacgtgggtgtatattattgctttcagggttcccacgttccgcgcaccttcggcggcgggaccaaagttgagatcaaagctagcgccaagcctaccaccacccctgcccctagacctccaacacccgccccaacaatcgccagccagcctctgtctctgaggcccgaggcttgtagaccagctgctggcggagccgtacacaccagaggactggatttcgcctgcgacttttgggtgctggtggtggttggtggagtcctggcttgctatagcttgctagtaacagtggcctttattattttctgggtgatgcataggagtaagaggagcaggctcctgcacagtgactacatgaacatgactccccgccgccccgggcccacccgcaagcattaccagccctatgccccaccacgcgacttcgcagcctatcgctcccgggtgaagttcagcagaagcgccgacgcccctgcctaccagcagggccagaatcagctgtacaacgagctgaacctgggcagaagggaagagtacgacgtcctggataagcggagaggccgggaccctgagatgggcggcaagcctcggcggaagaacccccaggaaggcctgtataacgaactgcagaaagacaagatggccgaggcctacagcgagatcggcatgaagggcgagcggaggcggggcaagggccacgacggcctgtatcagggcctgtccaccgccaccaaggatacctacgacgccctgcacatgcaggccctgcccccaaggactagtggaagcggagcgactaacttcagcctgctgaagcaggccggagatgtggaggaaaaccctggaccgatgggggcaggtgccaccggacgagccatggacgggccgcgcctgctgctgttgctgcttctgggggtgtcccttggaggtgccaaggaggcatgccccacaggcctgtacacacacagcggtgagtgctgcaaagcctgcaacctgggcgagggtgtggcccagccttgtggagccaaccagaccgtgtgtgagccctgcctggacagcgtgacgttctccgacgtggtgagcgcgaccgagccgtgcaagccgtgcaccgagtgcgtggggctccagagcatgtcggcgccgtgcgtggaggccgacgacgccgtgtgccgctgcgcctacggctactaccaggatgagacgactgggcgctgcgaggcgtgccgcgtgtgcgaggcgggctcgggcctcgtgttctcctgccaggacaagcagaacaccgtgtgcgaggagtgccccgacggcacgtattccgacgaggccaaccacgtggacccgtgcctgccctgcaccgtgtgcgaggacaccgagcgccagctccgcgagtgcacacgctgggccgacgccgagtgcgaggagatccctggccgttggattacacggtccacacccccagagggctcggacagcacagcccccagcacccaggagcctgaggcacctccagaacaagacctcatagccagcacggtggcaggtgtggtgaccacagtgatgggcagctcccagcccgtggtgacccgaggcaccaccgacaacctcatccctgtctattgctccatcctggctgctgtggttgtgggtcttgtggcctacatagccttcaagaggtgatgtcgacaatcaacctctggattacaaaatttgtgaaagattgactggtattcttaactatgttgctccttttacgctatgtggatacgctgctttaatgcctttgtatcatgctattgcttcccgtatggctttcattttctcctccttgtataaatcctggttgctgtctctttatgaggagttgtggcccgttgtcaggcaacgtggcgtggtgtgcactgtgtttgctgacgcaacccccactggttggggcattgccaccacctgtcagctcctttccgggactttcgctttccccctccctattgccacggcggaactcatcgccgcctgccttgcccgctgctggacaggggctcggctgttgggcactgacaattccgtggtgttgtcggggaagctgacgtcctttccatggctgctcgcctgtgttgccacctggattctgcgcgggacgtccttctgctacgtcccttcggccctcaatccagcggaccttccttcccgcggcctgctgccggctctgcggcctcttccgcgtcttcgccttcgccctcagacgagtcggatctccctttgggccgcctccccgcctggaattcgagctcggtacctttaagaccaatgacttacaaggcagctgtagatcttagccactttttaaaagaaaaggggggactggaagggctaattcactcccaacgaagacaagatctgctttttgcttgtactgggtctctctggttagaccagatctgagcctgggagctctctggctaactagggaacccactgcttaagcctcaataaagcttgccttgagtgcttcaagtagtgtgtgcccgtctgttgtgtgactctggtaactagagatccctcagacccttttagtcagtgtggaaaatctctagcagtagtagttcatgtcatcttattattcagtatttataacttgcaaagaaatgaatatcagagagtgagaggaacttgtttattgcagcttataatggttacaaataaagcaatagcatcacaaatttcacaaataaagcatttttttcactgcattctagttgtggtttgtccaaactcatcaatgtatcttatcatgtctggctctagctatcccgcccctaactccgcccagttccgcccattctccgccccatggctgactaattttttttatttatgcagaggccgaggccgcctcggcctctgagctattccagaagtagtgaggaggcttttttggaggcctaggcttttgcgtcgagacgtacccaattcgccctatagtgagtcgtattacgcgcgctcactggccgtcgttttacaacgtcgtgactgggaaaaccctggcgttacccaacttaatcgccttgcagcacatccccctttcgccagctggcgtaatagcgaagaggcccgcaccgatcgcccttcccaacagttgcgcagcctgaatggcgaatggcgcgacgcgccctgtagcggcgcattaagcgcggcgggtgtggtggttacgcgcagcgtgaccgctacacttgccagcgccctagcgcccgctcctttcgctttcttcccttcctttctcgccacgttcgccggctttccccgtcaagctctaaatcgggggctccctttagggttccgatttagtgctttacggcacctcgaccccaaaaaacttgattagggtgatggttcacgtagtgggccatcgccctgatagacggtttttcgccctttgacgttggagtccacgttctttaatagtggactcttgttccaaactggaacaacactcaaccctatctcggtctattcttttgatttataagggattttgccgatttcggcctattggttaaaaaatgagctgatttaacaaaaatttaacgcgaattttaacaaaatattaacgtttacaatttcccaggtggcacttttcggggaaatgtgcgcggaacccctatttgtttatttttctaaatacattcaaatatgtatccgctcatgagacaataaccctgataaatgcttcaataatattgaaaaaggaagagtatgagtattcaacatttccgtgtcgcccttattcccttttttgcggcattttgccttcctgtttttgctcacccagaaacgctggtgaaagtaaaagatgctgaagatcagttgggtgcacgagtgggttacatcgaactggatctcaacagcggtaagatccttgagagttttcgccccgaagaacgttttccaatgatgagcacttttaaagttctgctatgtggcgcggtattatcccgtattgacgccgggcaagagcaactcggtcgccgcatacactattctcagaatgacttggttgagtactcaccagtcacagaaaagcatcttacggatggcatgacagtaagagaattatgcagtgctgccataaccatgagtgataacactgcggccaacttacttctgacaacgatcggaggaccgaaggagctaaccgcttttttgcacaacatgggggatcatgtaactcgccttgatcgttgggaaccggagctgaatgaagccataccaaacgacgagcgtgacaccacgatgcctgtagcaatggcaacaacgttgcgcaaactattaactggcgaactacttactctagcttcccggcaacaattaatagactggatggaggcggataaagttgcaggaccacttctgcgctcggcccttccggctggctggtttattgctgataaatctggagccggtgagcgtgggtctcgcggtatcattgcagcactggggccagatggtaagccctcccgtatcgtagttatctacacgacggggagtcaggcaactatggatgaacgaaatagacagatcgctgagataggtgcctcactgattaagcattggtaactgtcagaccaagtttactcatatatactttagattgatttaaaacttcatttttaatttaaaaggatctaggtgaagatcctttttgataatctcatgaccaaaatcccttaacgtgagttttcgttccactgagcgtcagaccccgtagaaaagatcaaaggatcttcttgagatcctttttttctgcgcgtaatctgctgcttgcaaacaaaaaaaccaccgctaccagcggtggtttgtttgccggatcaagagctaccaactctttttccgaaggtaactggcttcagcagagcgcagataccaaatactgtccttctagtgtagccgtagttaggccaccacttcaagaactctgtagcaccgcctacatacctcgctctgctaatcctgttaccagtggctgctgccagtggcgataagtcgtgtcttaccgggttggactcaagacgatagttaccggataaggcgcagcggtcgggctgaacggggggttcgtgcacacagcccagcttggagcgaacgacctacaccgaactgagatacctacagcgtgagctatgagaaagcgccacgcttcccgaagggagaaaggcggacaggtatccggtaagcggcagggtcggaacaggagagcgcacgagggagcttccagggggaaacgcctggtatctttatagtcctgtcgggtttcgccacctctgacttgagcgtcgatttttgtgatgctcgtcaggggggcggagcctatggaaaaacgccagcaacgcggcctttttacggttcctggccttttgctggccttttgctcacatgttctttcctgcgttatcccctgattctgtggataaccgtattaccgcctttgagtgagctgataccgctcgccgcagccgaacgaccgagcgcagcgagtcagtgagcgaggaagcggaagagcgcccaatacgcaaaccgcctctccccgcgcgttggccgattcattaatgcagctggcacgacaggtttcccgactggaaagcgggcagtgagcgcaacgcaattaatgtgagttagctcactcattaggcaccccaggctttacactttatgcttccggctcgtatgttgtgtggaattgtgagcggataacaatttcacacaggaaacagctatgaccatgattacgccaagcgcgcaattaaccctcactaaagggaacaaaagctggagctgca

SEQ ID NO: 1417 - DNA, 2821 bp, Artificial Sequence
  extracted sequence from LVA2CAR
gaacagagaaacaggagaatatgggccaaacaggatatctgtggtaagcagttcctgccccggctcagggccaagaacagttggaacagcagaatatgggccaaacaggatatctgtggtaagcagttcctgccccggctcagggccaagaacagatggtccccagatgcggtcccgccctcagcagtttctagagaaccatcagatgtttccagggtgccccaaggacctgaaatgaccctgtgccttatttgaactaaccaatcagttcgcttctcgcttctgttcgcgcgcttctgctccccgagctctatataagcagagctcgtttagtgaaccgtcagatcgcctggagacgccatccacgctgttttgacttccatagaaggatctcgaggccgccaccatggctctgcctgtgacagctctgctgctgcctctggccctgctgctccatgccgccagacccggatcccaggtacagctcgttcaatctggggctgaagtaaaaaagcctggagcgtctgtaaaggtatcttgcaaagcgagcggctacacattcacaagttatcacatccaatgggtgagacaggccccaggacaacgcttggagtggatggggtggatttaccctggcgacggcagcacacagtacaatgagaaatttaaaggccgggtgactatcactcgggacacctccgccagcacggcttatatggagcttagcagtttgagatccgaagatacagcggtatattactgcgcgagagaaggaacgtactacgctatggactattggggtcagggcacaaccgttacagtctcctctgtggacagctccggaggtgggggttcaggagggggtggaagcggtggtggtggcagtacaagcgatatagtaatgacccaaaccccgctctctctgagcgtcacgccaggacaaccagcatcaatctcttgccgcagtagtcaatccatcgttcactctaatggaaacacataccttgagtggtatcttcagaaaccaggtcagagccctcagctcctcatctataaagtctctaaccggttctcaggtgttccggaccggttcagtggttccggctcaggaacagacttcaccttgaagatcagtcgagtagaagccgaagacgtgggtgtatattattgctttcagggttcccacgttccgcgcaccttcggcggcgggaccaaagttgagatcaaagctagcgccaagcctaccaccacccctgcccctagacctccaacacccgccccaacaatcgccagccagcctctgtctctgaggcccgaggcttgtagaccagctgctggcggagccgtacacaccagaggactggatttcgcctgcgacttttgggtgctggtggtggttggtggagtcctggcttgctatagcttgctagtaacagtggcctttattattttctgggtgatgcataggagtaagaggagcaggctcctgcacagtgactacatgaacatgactccccgccgccccgggcccacccgcaagcattaccagccctatgccccaccacgcgacttcgcagcctatcgctcccgggtgaagttcagcagaagcgccgacgcccctgcctaccagcagggccagaatcagctgtacaacgagctgaacctgggcagaagggaagagtacgacgtcctggataagcggagaggccgggaccctgagatgggcggcaagcctcggcggaagaacccccaggaaggcctgtataacgaactgcagaaagacaagatggccgaggcctacagcgagatcggcatgaagggcgagcggaggcggggcaagggccacgacggcctgtatcagggcctgtccaccgccaccaaggatacctacgacgccctgcacatgcaggccctgcccccaaggactagtggaagcggagcgactaacttcagcctgctgaagcaggccggagatgtggaggaaaaccctggaccgatgggggcaggtgccaccggacgagccatggacgggccgcgcctgctgctgttgctgcttctgggggtgtcccttggaggtgccaaggaggcatgccccacaggcctgtacacacacagcggtgagtgctgcaaagcctgcaacctgggcgagggtgtggcccagccttgtggagccaaccagaccgtgtgtgagccctgcctggacagcgtgacgttctccgacgtggtgagcgcgaccgagccgtgcaagccgtgcaccgagtgcgtggggctccagagcatgtcggcgccgtgcgtggaggccgacgacgccgtgtgccgctgcgcctacggctactaccaggatgagacgactgggcgctgcgaggcgtgccgcgtgtgcgaggcgggctcgggcctcgtgttctcctgccaggacaagcagaacaccgtgtgcgaggagtgccccgacggcacgtattccgacgaggccaaccacgtggacccgtgcctgccctgcaccgtgtgcgaggacaccgagcgccagctccgcgagtgcacacgctgggccgacgccgagtgcgaggagatccctggccgttggattacacggtccacacccccagagggctcggacagcacagcccccagcacccaggagcctgaggcacctccagaacaagacctcatagccagcacggtggcaggtgtggtgaccacagtgatgggcagctcccagcccgtggtgacccgaggcaccaccgacaacctcatccctgtctattgctccatcctggctgctgtggttgtgggtcttgtggcctacatagccttcaagaggtga

SEQ ID NO: 1418 - DNA, 8455 bp, Artificial Sequence
  lentiviral vector expressing a non-signaling A2CAR protein
agcttaatgtagtcttatgcaatactcttgtagtcttgcaacatggtaacgatgagttagcaacatgccttacaaggagagaaaaagcaccgtgcatgccgattggtggaagtaaggtggtacgatcgtgccttattaggaaggcaacagacgggtctgacatggattggacgaaccactgaattgccgcattgcagagatattgtatttaagtgcctagctcgatacaataaacgggtctctctggttagaccagatctgagcctgggagctctctggctaactagggaacccactgcttaagcctcaataaagcttgccttgagtgcttcaagtagtgtgtgcccgtctgttgtgtgactctggtaactagagatccctcagacccttttagtcagtgtggaaaatctctagcagtggcgcccgaacagggacctgaaagcgaaagggaaaccagagctctctcgacgcaggactcggcttgctgaagcgcgcacggcaagaggcgaggggcggcgactggtgagtacgccaaaaattttgactagcggaggctagaaggagagagatgggtgcgagagcgtcagtattaagcgggggagaattagatcgcgatgggaaaaaattcggttaaggccagggggaaagaaaaaatataaattaaaacatatagtatgggcaagcagggagctagaacgattcgcagttaatcctggcctgttagaaacatcagaaggctgtagacaaatactgggacagctacaaccatcccttcagacaggatcagaagaacttagatcattatataatacagtagcaaccctctattgtgtgcatcaaaggatagagataaaagacaccaaggaagctttagacaagatagaggaagagcaaaacaaaagtaagaccaccgcacagcaagcggacgctgatcttcagacctggaggaggagatatgagggacaattggagaagtgaattatataaatataaagtagtaaaaattgaaccattaggagtagcacccaccaaggcaaagagaagagtggtgcagagagaaaaaagagcagtgggaataggagctttgttccttgggttcttgggagcagcaggaagcactatgggcgcagcctcaatgacgctgacggtacaggccagacaattattgtctggtatagtgcagcagcagaacaatttgctgagggctattgaggcgcaacagcatctgttgcaactcacagtctggggcatcaagcagctccaggcaagaatcctggctgtggaaagatacctaaaggatcaacagctcctggggatttggggttgctctggaaaactcatttgcaccactgctgtgccttggaatgctagttggagtaataaatctctggaacagatttggaatcacacgacctggatggagtgggacagagaaattaacaattacacaagcttaatacactccttaattgaagaatcgcaaaaccagcaagaaaagaatgaacaagaattattggaattagataaatgggcaagtttgtggaattggtttaacataacaaattggctgtggtatataaaattattcataatgatagtaggaggcttggtaggtttaagaatagtttttgctgtactttctatagtgaatagagttaggcagggatattcaccattatcgtttcagacccacctcccaaccccgaggggacccgacaggcccgaaggaatagaagaagaaggtggagagagagacagagacagatccattcgattagtgaacggatctcgacggtatcggttaacttttaaaagaaaaggggggattggggggtacagtgcaggggaaagaatagtagacataatagcaacagacatacaaactaaagaattacaaaaacaaattacaaaaattcaaaattttatcgattacgcgtaggaacagagaaacaggagaatatgggccaaacaggatatctgtggtaagcagttcctgccccggctcagggccaagaacagttggaacagcagaatatgggccaaacaggatatctgtggtaagcagttcctgccccggctcagggccaagaacagatggtccccagatgcggtcccgccctcagcagtttctagagaaccatcagatgtttccagggtgccccaaggacctgaaatgaccctgtgccttatttgaactaaccaatcagttcgcttctcgcttctgttcgcgcgcttctgctccccgagctctatataagcagagctcgtttagtgaaccgtcagatcgcctggagacgccatccacgctgttttgacttccatagaaggatctcgaggccgccaccatggctctgcctgtgacagctctgctgctgcctctggccctgctgctccatgccgccagacccggatcccaggtacagctcgttcaatctggggctgaagtaaaaaagcctggagcgtctgtaaaggtatcttgcaaagcgagcggctacacattcacaagttatcacatccaatgggtgagacaggccccaggacaacgcttggagtggatggggtggatttaccctggcgacggcagcacacagtacaatgagaaatttaaaggccgggtgactatcactcgggacacctccgccagcacggcttatatggagcttagcagtttgagatccgaagatacagcggtatattactgcgcgagagaaggaacgtactacgctatggactattggggtcagggcacaaccgttacagtctcctctgtggacagctccggaggtgggggttcaggagggggtggaagcggtggtggtggcagtacaagcgatatagtaatgacccaaaccccgctctctctgagcgtcacgccaggacaaccagcatcaatctcttgccgcagtagtcaatccatcgttcactctaatggaaacacataccttgagtggtatcttcagaaaccaggtcagagccctcagctcctcatctataaagtctctaaccggttctcaggtgttccggaccggttcagtggttccggctcaggaacagacttcaccttgaagatcagtcgagtagaagccgaagacgtgggtgtatattattgctttcagggttcccacgttccgcgcaccttcggcggcgggaccaaagttgagatcaaagctagcgccaagcctaccaccacccctgcccctagacctccaacacccgccccaacaatcgccagccagcctctgtctctgaggcccgaggcttgtagaccagctgctggcggagccgtacacaccagaggactggatttcgcctgcgacttttgggtgctggtggtggttggtggagtcctggcttgctatagcttgctagtaacagtggcctttattattttctgggtgatgcatactagtggaagcggagcgactaacttcagcctgctgaagcaggccggagatgtggaggaaaaccctggaccgatgggggcaggtgccaccggacgagccatggacgggccgcgcctgctgctgttgctgcttctgggggtgtcccttggaggtgccaaggaggcatgccccacaggcctgtacacacacagcggtgagtgctgcaaagcctgcaacctgggcgagggtgtggcccagccttgtggagccaaccagaccgtgtgtgagccctgcctggacagcgtgacgttctccgacgtggtgagcgcgaccgagccgtgcaagccgtgcaccgagtgcgtggggctccagagcatgtcggcgccgtgcgtggaggccgacgacgccgtgtgccgctgcgcctacggctactaccaggatgagacgactgggcgctgcgaggcgtgccgcgtgtgcgaggcgggctcgggcctcgtgttctcctgccaggacaagcagaacaccgtgtgcgaggagtgccccgacggcacgtattccgacgaggccaaccacgtggacccgtgcctgccctgcaccgtgtgcgaggacaccgagcgccagctccgcgagtgcacacgctgggccgacgccgagtgcgaggagatccctggccgttggattacacggtccacacccccagagggctcggacagcacagcccccagcacccaggagcctgaggcacctccagaacaagacctcatagccagcacggtggcaggtgtggtgaccacagtgatgggcagctcccagcccgtggtgacccgaggcaccaccgacaacctcatccctgtctattgctccatcctggctgctgtggttgtgggtcttgtggcctacatagccttcaagaggtgatgtcgacaatcaacctctggattacaaaatttgtgaaagattgactggtattcttaactatgttgctccttttacgctatgtggatacgctgctttaatgcctttgtatcatgctattgcttcccgtatggctttcattttctcctccttgtataaatcctggttgctgtctctttatgaggagttgtggcccgttgtcaggcaacgtggcgtggtgtgcactgtgtttgctgacgcaacccccactggttggggcattgccaccacctgtcagctcctttccgggactttcgctttccccctccctattgccacggcggaactcatcgccgcctgccttgcccgctgctggacaggggctcggctgttgggcactgacaattccgtggtgttgtcggggaagctgacgtcctttccatggctgctcgcctgtgttgccacctggattctgcgcgggacgtccttctgctacgtcccttcggccctcaatccagcggaccttccttcccgcggcctgctgccggctctgcggcctcttccgcgtcttcgccttcgccctcagacgagtcggatctccctttgggccgcctccccgcctggaattcgagctcggtacctttaagaccaatgacttacaaggcagctgtagatcttagccactttttaaaagaaaaggggggactggaagggctaattcactcccaacgaagacaagatctgctttttgcttgtactgggtctctctggttagaccagatctgagcctgggagctctctggctaactagggaacccactgcttaagcctcaataaagcttgccttgagtgcttcaagtagtgtgtgcccgtctgttgtgtgactctggtaactagagatccctcagacccttttagtcagtgtggaaaatctctagcagtagtagttcatgtcatcttattattcagtatttataacttgcaaagaaatgaatatcagagagtgagaggaacttgtttattgcagcttataatggttacaaataaagcaatagcatcacaaatttcacaaataaagcatttttttcactgcattctagttgtggtttgtccaaactcatcaatgtatcttatcatgtctggctctagctatcccgcccctaactccgcccagttccgcccattctccgccccatggctgactaattttttttatttatgcagaggccgaggccgcctcggcctctgagctattccagaagtagtgaggaggcttttttggaggcctaggcttttgcgtcgagacgtacccaattcgccctatagtgagtcgtattacgcgcgctcactggccgtcgttttacaacgtcgtgactgggaaaaccctggcgttacccaacttaatcgccttgcagcacatccccctttcgccagctggcgtaatagcgaagaggcccgcaccgatcgcccttcccaacagttgcgcagcctgaatggcgaatggcgcgacgcgccctgtagcggcgcattaagcgcggcgggtgtggtggttacgcgcagcgtgaccgctacacttgccagcgccctagcgcccgctcctttcgctttcttcccttcctttctcgccacgttcgccggctttccccgtcaagctctaaatcgggggctccctttagggttccgatttagtgctttacggcacctcgaccccaaaaaacttgattagggtgatggttcacgtagtgggccatcgccctgatagacggtttttcgccctttgacgttggagtccacgttctttaatagtggactcttgttccaaactggaacaacactcaaccctatctcggtctattcttttgatttataagggattttgccgatttcggcctattggttaaaaaatgagctgatttaacaaaaatttaacgcgaattttaacaaaatattaacgtttacaatttcccaggtggcacttttcggggaaatgtgcgcggaacccctatttgtttatttttctaaatacattcaaatatgtatccgctcatgagacaataaccctgataaatgcttcaataatattgaaaaaggaagagtatgagtattcaacatttccgtgtcgcccttattcccttttttgcggcattttgccttcctgtttttgctcacccagaaacgctggtgaaagtaaaagatgctgaagatcagttgggtgcacgagtgggttacatcgaactggatctcaacagcggtaagatccttgagagttttcgccccgaagaacgttttccaatgatgagcacttttaaagttctgctatgtggcgcggtattatcccgtattgacgccgggcaagagcaactcggtcgccgcatacactattctcagaatgacttggttgagtactcaccagtcacagaaaagcatcttacggatggcatgacagtaagagaattatgcagtgctgccataaccatgagtgataacactgcggccaacttacttctgacaacgatcggaggaccgaaggagctaaccgcttttttgcacaacatgggggatcatgtaactcgccttgatcgttgggaaccggagctgaatgaagccataccaaacgacgagcgtgacaccacgatgcctgtagcaatggcaacaacgttgcgcaaactattaactggcgaactacttactctagcttcccggcaacaattaatagactggatggaggcggataaagttgcaggaccacttctgcgctcggcccttccggctggctggtttattgctgataaatctggagccggtgagcgtgggtctcgcggtatcattgcagcactggggccagatggtaagccctcccgtatcgtagttatctacacgacggggagtcaggcaactatggatgaacgaaatagacagatcgctgagataggtgcctcactgattaagcattggtaactgtcagaccaagtttactcatatatactttagattgatttaaaacttcatttttaatttaaaaggatctaggtgaagatcctttttgataatctcatgaccaaaatcccttaacgtgagttttcgttccactgagcgtcagaccccgtagaaaagatcaaaggatcttcttgagatcctttttttctgcgcgtaatctgctgcttgcaaacaaaaaaaccaccgctaccagcggtggtttgtttgccggatcaagagctaccaactctttttccgaaggtaactggcttcagcagagcgcagataccaaatactgtccttctagtgtagccgtagttaggccaccacttcaagaactctgtagcaccgcctacatacctcgctctgctaatcctgttaccagtggctgctgccagtggcgataagtcgtgtcttaccgggttggactcaagacgatagttaccggataaggcgcagcggtcgggctgaacggggggttcgtgcacacagcccagcttggagcgaacgacctacaccgaactgagatacctacagcgtgagctatgagaaagcgccacgcttcccgaagggagaaaggcggacaggtatccggtaagcggcagggtcggaacaggagagcgcacgagggagcttccagggggaaacgcctggtatctttatagtcctgtcgggtttcgccacctctgacttgagcgtcgatttttgtgatgctcgtcaggggggcggagcctatggaaaaacgccagcaacgcggcctttttacggttcctggccttttgctggccttttgctcacatgttctttcctgcgttatcccctgattctgtggataaccgtattaccgcctttgagtgagctgataccgctcgccgcagccgaacgaccgagcgcagcgagtcagtgagcgaggaagcggaagagcgcccaatacgcaaaccgcctctccccgcgcgttggccgattcattaatgcagctggcacgacaggtttcccgactggaaagcgggcagtgagcgcaacgcaattaatgtgagttagctcactcattaggcaccccaggctttacactttatgcttccggctcgtatgttgtgtggaattgtgagcggataacaatttcacacaggaaacagctatgaccatgattacgccaagcgcgcaattaaccctcactaaagggaacaaaagctggagctgca

SEQ ID NO: 1419 - DNA, 2362 bp, Artificial Sequence
  extracted sequence from LV. delta A2CAR
gaacagagaaacaggagaatatgggccaaacaggatatctgtggtaagcagttcctgccccggctcagggccaagaacagttggaacagcagaatatgggccaaacaggatatctgtggtaagcagttcctgccccggctcagggccaagaacagatggtccccagatgcggtcccgccctcagcagtttctagagaaccatcagatgtttccagggtgccccaaggacctgaaatgaccctgtgccttatttgaactaaccaatcagttcgcttctcgcttctgttcgcgcgcttctgctccccgagctctatataagcagagctcgtttagtgaaccgtcagatcgcctggagacgccatccacgctgttttgacttccatagaaggatctcgaggccgccaccatggctctgcctgtgacagctctgctgctgcctctggccctgctgctccatgccgccagacccggatcccaggtacagctcgttcaatctggggctgaagtaaaaaagcctggagcgtctgtaaaggtatcttgcaaagcgagcggctacacattcacaagttatcacatccaatgggtgagacaggccccaggacaacgcttggagtggatggggtggatttaccctggcgacggcagcacacagtacaatgagaaatttaaaggccgggtgactatcactcgggacacctccgccagcacggcttatatggagcttagcagtttgagatccgaagatacagcggtatattactgcgcgagagaaggaacgtactacgctatggactattggggtcagggcacaaccgttacagtctcctctgtggacagctccggaggtgggggttcaggagggggtggaagcggtggtggtggcagtacaagcgatatagtaatgacccaaaccccgctctctctgagcgtcacgccaggacaaccagcatcaatctcttgccgcagtagtcaatccatcgttcactctaatggaaacacataccttgagtggtatcttcagaaaccaggtcagagccctcagctcctcatctataaagtctctaaccggttctcaggtgttccggaccggttcagtggttccggctcaggaacagacttcaccttgaagatcagtcgagtagaagccgaagacgtgggtgtatattattgctttcagggttcccacgttccgcgcaccttcggcggcgggaccaaagttgagatcaaagctagcgccaagcctaccaccacccctgcccctagacctccaacacccgccccaacaatcgccagccagcctctgtctctgaggcccgaggcttgtagaccagctgctggcggagccgtacacaccagaggactggatttcgcctgcgacttttgggtgctggtggtggttggtggagtcctggcttgctatagcttgctagtaacagtggcctttattattttctgggtgatgcatactagtggaagcggagcgactaacttcagcctgctgaagcaggccggagatgtggaggaaaaccctggaccgatgggggcaggtgccaccggacgagccatggacgggccgcgcctgctgctgttgctgcttctgggggtgtcccttggaggtgccaaggaggcatgccccacaggcctgtacacacacagcggtgagtgctgcaaagcctgcaacctgggcgagggtgtggcccagccttgtggagccaaccagaccgtgtgtgagccctgcctggacagcgtgacgttctccgacgtggtgagcgcgaccgagccgtgcaagccgtgcaccgagtgcgtggggctccagagcatgtcggcgccgtgcgtggaggccgacgacgccgtgtgccgctgcgcctacggctactaccaggatgagacgactgggcgctgcgaggcgtgccgcgtgtgcgaggcgggctcgggcctcgtgttctcctgccaggacaagcagaacaccgtgtgcgaggagtgccccgacggcacgtattccgacgaggccaaccacgtggacccgtgcctgccctgcaccgtgtgcgaggacaccgagcgccagctccgcgagtgcacacgctgggccgacgccgagtgcgaggagatccctggccgttggattacacggtccacacccccagagggctcggacagcacagcccccagcacccaggagcctgaggcacctccagaacaagacctcatagccagcacggtggcaggtgtggtgaccacagtgatgggcagctcccagcccgtggtgacccgaggcaccaccgacaacctcatccctgtctattgctccatcctggctgctgtggttgtgggtcttgtggcctacatagccttcaagaggtga

SEQ ID NO: 1420 - DNA, 7472 bp, Artificial Sequence
  TRAC-T4 guide specific AAV
gtagaaaagatcaaaggatcttcttgagatcctttttttctgcgcgtaatctgctgcttgcaaacaaaaaaaccaccgctaccagcggtggtttgtttgccggatcaagagctaccaactctttttccgaaggtaactggcttcagcagagcgcagataccaaatactgtccttctagtgtagccgtagttaggccaccacttcaagaactctgtagcaccgcctacatacctcgctctgctaatcctgttaccagtggctgctgccagtggcgataagtcgtgtcttaccgggttggactcaagacgatagttaccggataaggcgcagcggtcgggctgaacggggggttcgtgcacacagcccagcttggagcgaacgacctacaccgaactgagatacctacagcgtgagctatgagaaagcgccacgcttcccgaagggagaaaggcggacaggtatccggtaagcggcagggtcggaacaggagagcgcacgagggagcttccagggggaaacgcctggtatctttatagtcctgtcgggtttcgccacctctgacttgagcgtcgatttttgtgatgctcgtcaggggggcggagcctatggaaaaacgccagcaacgcggcctttttacggttcctggccttttgctggccttttgctcacatgttctttcctgcgttatcccctgattctgtggataaccgtattaccgcctttgagtgagctgataccgctcgccgcagccgaacgaccgagcgcagcgagtcagtgagcgaggaagcggaagagcgcccaatacgcaaaccgcctctccccgcgcgttggccgattcattaatgcagctgcgcgctcgctcgctcactgaggccgcccgggcaaagcccgggcgtcgggcgacctttggtcgcccggcctcagtgagcgagcgagcgcgcagagagggagtggccaactccatcactaggggttccttgtagttaatgattaacccgccatgctacttatctacgtagcggccgcactgaaatcatggcctcttggccaagattgatagcttgtgcctgtccctgagtcccagtccatcacgagcagctggtttctaagatgctatttcccgtataaagcatgagaccgtgacttgccagccccacagagccccgcccttgtccatcactggcatctggactccagcctgggttggggcaaagagggaaatgagatcatgtcctaaccctgatcctcttgtcccacagatatccagaaccctgaccctgccgtgtaccagctgagagactctaaatccagtgacaagtctgtctgcctatattaaggaacagagaaacaggagaatatgggccaaacaggatatctgtggtaagcagttcctgccccggctcagggccaagaacagttggaacagcagaatatgggccaaacaggatatctgtggtaagcagttcctgccccggctcagggccaagaacagatggtccccagatgcggtcccgccctcagcagtttctagagaaccatcagatgtttccagggtgccccaaggacctgaaatgaccctgtgccttatttgaactaaccaatcagttcgcttctcgcttctgttcgcgcgcttctgctccccgagctctatataagcagagctcgtttagtgaaccgtcagatcgcctggagacgccatccacgctgttttgacttccatagaaggatcgactcgagtaatgcctctgggcctgctgtggctgggcctggccctgctgggcgccctgcacgcccaggccggcgtgcaggtggagacaatctccccaggcgacggacgcacattccctaagcggggccagacctgcgtggtgcactatacaggcatgctggaggatggcaagaagtttgacagctcccgggatagaaacaagccattcaagtttatgctgggcaagcaggaagtgatcagaggctgggaggagggcgtggcccagatgtctgtgggccagagggccaagctgaccatcagcccagactacgcctatggagcaacaggccacccaggaatcatcccacctcacgccaccctggtgttcgatgtggagctgctgaagctgggcgagggatccaacacatcaaaagagaacccctttctgttcgcattggaggccgtagtcatatctgttggatccatgggacttattatctccctgttgtgtgtgtacttctggctggaacggactatgcccaggatccccacgctcaagaatctggaagatctcgtcacagaataccatggtaatttcagcgcctggagcggagtctctaagggtctggccgaatccctccaacccgattattctgaacggttgtgcctcgtatccgaaataccaccaaaaggcggggctctgggtgagggcccaggggcgagtccgtgcaatcaacacagcccgtattgggcccctccttgttatacgttgaagcccgaaactggaagcggagcgactaacttttctctgcttaaacaggcaggcgatgtcgaggaaaaccctggaccgactagtatggctctgcctgtgacagctctgctgctgcctctggccctgctgctccatgccgccagacccggatcccaggtacagctcgttcaatctggggctgaagtaaaaaagcctggagcgtctgtaaaggtatcttgcaaagcgagcggctacacattcacaagttatcacatccaatgggtgagacaggccccaggacaacgcttggagtggatggggtggatttaccctggcgacggcagcacacagtacaatgagaaatttaaaggccgggtgactatcactcgggacacctccgccagcacggcttatatggagcttagcagtttgagatccgaagatacagcggtatattactgcgcgagagaaggaacgtactacgctatggactattggggtcagggcacaaccgttacagtctcctctgtggacagctccggaggtgggggttcaggagggggtggaagcggtggtggtggcagtacaagcgatatagtaatgacccaaaccccgctctctctgagcgtcacgccaggacaaccagcatcaatctcttgccgcagtagtcaatccatcgttcactctaatggaaacacataccttgagtggtatcttcagaaaccaggtcagagccctcagctcctcatctataaagtctctaaccggttctcaggtgttccggaccggttcagtggttccggctcaggaacagacttcaccttgaagatcagtcgagtagaagccgaagacgtgggtgtatattattgctttcagggttcccacgttccgcgcaccttcggcggcgggaccaaagttgagatcaaagctagcgccaagcctaccaccacccctgcccctagacctccaacacccgccccaacaatcgccagccagcctctgtctctgaggcccgaggcttgtagaccagctgctggcggagccgtacacaccagaggactggatttcgcctgcgacttttgggtgctggtggtggttggtggagtcctggcttgctatagcttgctagtaacagtggcctttattattttctgggtgatgcataggagtaagaggagcaggctcctgcacagtgactacatgaacatgactccccgccgccccgggcccacccgcaagcattaccagccctatgccccaccacgcgacttcgcagcctatcgctcccgggtgaagttcagcagaagcgccgacgcccctgcctaccagcagggccagaatcagctgtacaacgagctgaacctgggcagaagggaagagtacgacgtcctggataagcggagaggccgggaccctgagatgggcggcaagcctcggcggaagaacccccaggaaggcctgtataacgaactgcagaaagacaagatggccgaggcctacagcgagatcggcatgaagggcgagcggaggcggggcaagggccacgacggcctgtatcagggcctgtccaccgccaccaaggatacctacgacgccctgcacatgcaggccctgcccccaaggaagcttaattgagcggccgcgctttatttgtgaaatttgtgatgctattgctttatttgtaaccattataagctgcaataaacaagttaacaacaacaattgcattcattttatgtttcaggttcagggggagatgtgggaggttttttaaagctcaccgattttgattctcaaacaaatgtgtcacaaagtaaggattctgatgtgtatatcacagacaaaactgtgctagacatgaggtctatggacttcaagagcaacagtgctgtggcctggagcaacaaatctgactttgcatgtgcaaacgccttcaacaacagcattattccagaagacaccttcttccccagcccaggtaagggcagctttggtgccttcgcaggctgtttccttgcttcaggaatggccaggttctgcccagagctctggtcaatgatgtctaaaactcctctgattggtggtctcggcgcggccgctacgtagataagtagcatggcgggttaatcattaactacaaggaacccctagtgatggagttggccactccctctctgcgcgctcgctcgctcactgaggccgggcgaccaaaggtcgcccgacgcccgggctttgcccgggcggcctcagtgagcgagcgagcgcgccagctggcgtaatagcgaagaggcccgcaccgatcgcccttcccaacagttgcgcagcctgaatggcgaatggcgattccgttgcaatggctggcggtaatattgttctggatattaccagcaaggccgatagtttgagttcttctactcaggcaagtgatgttattactaatcaaagaagtattgcgacaacggttaatttgcgtgatggacagactcttttactcggtggcctcactgattataaaaacacttctcaggattctggcgtaccgttcctgtctaaaatccctttaatcggcctcctgtttagctcccgctctgattctaacgaggaaagcacgttatacgtgctcgtcaaagcaaccatagtacgcgccctgtagcggcgcattaagcgcggcgggtgtggtggttacgcgcagcgtgaccgctacacttgccagcgccctagcgcccgctcctttcgctttcttcccttcctttctcgccacgttcgccggctttccccgtcaagctctaaatcgggggctccctttagggttccgatttagtgctttacggcacctcgaccccaaaaaacttgattagggtgatggttcacgtagtgggccatcgccctgatagacggtttttcgccctttgacgttggagtccacgttctttaatagtggactcttgttccaaactggaacaacactcaaccctatctcggtctattcttttgatttataagggattttgccgatttcggcctattggttaaaaaatgagctgatttaacaaaaatttaacgcgaattttaacaaaatattaacgtttacaatttaaatatttgcttatacaatcttcctgtttttggggcttttctgattatcaaccggggtacatatgattgacatgctagttttacgattaccgttcatcgattctcttgtttgctccagactctcaggcaatgacctgatagcctttgtagagacctctcaaaaatagctaccctctccggcatgaatttatcagctagaacggttgaatatcatattgatggtgatttgactgtctccggcctttctcacccgtttgaatctttacctacacattactcaggcattgcatttaaaatatatgagggttctaaaaatttttatccttgcgttgaaataaaggcttctcccgcaaaagtattacagggtcataatgtttttggtacaaccgatttagctttatgctctgaggctttattgcttaattttgctaattctttgccttgcctgtatgatttattggatgttggaatcgcctgatgcggtattttctccttacgcatctgtgcggtatttcacaccgcatatggtgcactctcagtacaatctgctctgatgccgcatagttaagccagccccgacacccgccaacacccgctgacgcgccctgacgggcttgtctgctcccggcatccgcttacagacaagctgtgaccgtctccgggagctgcatgtgtcagaggttttcaccgtcatcaccgaaacgcgcgagacgaaagggcctcgtgatacgcctatttttataggttaatgtcatgataataatggtttcttagacgtcaggtggcacttttcggggaaatgtgcgcggaacccctatttgtttatttttctaaatacattcaaatatgtatccgctcatgagacaataaccctgataaatgcttcaataatattgaaaaaggaagagtatgagtattcaacatttccgtgtcgcccttattcccttttttgcggcattttgccttcctgtttttgctcacccagaaacgctggtgaaagtaaaagatgctgaagatcagttgggtgcacgagtgggttacatcgaactggatctcaacagcggtaagatccttgagagttttcgccccgaagaacgttttccaatgatgagcacttttaaagttctgctatgtggcgcggtattatcccgtattgacgccgggcaagagcaactcggtcgccgcatacactattctcagaatgacttggttgagtactcaccagtcacagaaaagcatcttacggatggcatgacagtaagagaattatgcagtgctgccataaccatgagtgataacactgcggccaacttacttctgacaacgatcggaggaccgaaggagctaaccgcttttttgcacaacatgggggatcatgtaactcgccttgatcgttgggaaccggagctgaatgaagccataccaaacgacgagcgtgacaccacgatgcctgtagcaatggcaacaacgttgcgcaaactattaactggcgaactacttactctagcttcccggcaacaattaatagactggatggaggcggataaagttgcaggaccacttctgcgctcggcccttccggctggctggtttattgctgataaatctggagccggtgagcgtgggtctcgcggtatcattgcagcactggggccagatggtaagccctcccgtatcgtagttatctacacgacggggagtcaggcaactatggatgaacgaaatagacagatcgctgagataggtgcctcactgattaagcattggtaactgtcagaccaagtttactcatatatactttagattgatttaaaacttcatttttaatttaaaaggatctaggtgaagatcctttttgataatctcatgaccaaaatcccttaacgtgagttttcgttccactgagcgtcagacccc

SEQ ID NO: 1421 - DNA, 3525 bp, Artificial Sequence
  extracted sequence from 3407
cactgaaatcatggcctcttggccaagattgatagcttgtgcctgtccctgagtcccagtccatcacgagcagctggtttctaagatgctatttcccgtataaagcatgagaccgtgacttgccagccccacagagccccgcccttgtccatcactggcatctggactccagcctgggttggggcaaagagggaaatgagatcatgtcctaaccctgatcctcttgtcccacagatatccagaaccctgaccctgccgtgtaccagctgagagactctaaatccagtgacaagtctgtctgcctatattaaggaacagagaaacaggagaatatgggccaaacaggatatctgtggtaagcagttcctgccccggctcagggccaagaacagttggaacagcagaatatgggccaaacaggatatctgtggtaagcagttcctgccccggctcagggccaagaacagatggtccccagatgcggtcccgccctcagcagtttctagagaaccatcagatgtttccagggtgccccaaggacctgaaatgaccctgtgccttatttgaactaaccaatcagttcgcttctcgcttctgttcgcgcgcttctgctccccgagctctatataagcagagctcgtttagtgaaccgtcagatcgcctggagacgccatccacgctgttttgacttccatagaaggatcgactcgagtaatgcctctgggcctgctgtggctgggcctggccctgctgggcgccctgcacgcccaggccggcgtgcaggtggagacaatctccccaggcgacggacgcacattccctaagcggggccagacctgcgtggtgcactatacaggcatgctggaggatggcaagaagtttgacagctcccgggatagaaacaagccattcaagtttatgctgggcaagcaggaagtgatcagaggctgggaggagggcgtggcccagatgtctgtgggccagagggccaagctgaccatcagcccagactacgcctatggagcaacaggccacccaggaatcatcccacctcacgccaccctggtgttcgatgtggagctgctgaagctgggcgagggatccaacacatcaaaagagaacccctttctgttcgcattggaggccgtagtcatatctgttggatccatgggacttattatctccctgttgtgtgtgtacttctggctggaacggactatgcccaggatccccacgctcaagaatctggaagatctcgtcacagaataccatggtaatttcagcgcctggagcggagtctctaagggtctggccgaatccctccaacccgattattctgaacggttgtgcctcgtatccgaaataccaccaaaaggcggggctctgggtgagggcccaggggcgagtccgtgcaatcaacacagcccgtattgggcccctccttgttatacgttgaagcccgaaactggaagcggagcgactaacttttctctgcttaaacaggcaggcgatgtcgaggaaaaccctggaccgactagtatggctctgcctgtgacagctctgctgctgcctctggccctgctgctccatgccgccagacccggatcccaggtacagctcgttcaatctggggctgaagtaaaaaagcctggagcgtctgtaaaggtatcttgcaaagcgagcggctacacattcacaagttatcacatccaatgggtgagacaggccccaggacaacgcttggagtggatggggtggatttaccctggcgacggcagcacacagtacaatgagaaatttaaaggccgggtgactatcactcgggacacctccgccagcacggcttatatggagcttagcagtttgagatccgaagatacagcggtatattactgcgcgagagaaggaacgtactacgctatggactattggggtcagggcacaaccgttacagtctcctctgtggacagctccggaggtgggggttcaggagggggtggaagcggtggtggtggcagtacaagcgatatagtaatgacccaaaccccgctctctctgagcgtcacgccaggacaaccagcatcaatctcttgccgcagtagtcaatccatcgttcactctaatggaaacacataccttgagtggtatcttcagaaaccaggtcagagccctcagctcctcatctataaagtctctaaccggttctcaggtgttccggaccggttcagtggttccggctcaggaacagacttcaccttgaagatcagtcgagtagaagccgaagacgtgggtgtatattattgctttcagggttcccacgttccgcgcaccttcggcggcgggaccaaagttgagatcaaagctagcgccaagcctaccaccacccctgcccctagacctccaacacccgccccaacaatcgccagccagcctctgtctctgaggcccgaggcttgtagaccagctgctggcggagccgtacacaccagaggactggatttcgcctgcgacttttgggtgctggtggtggttggtggagtcctggcttgctatagcttgctagtaacagtggcctttattattttctgggtgatgcataggagtaagaggagcaggctcctgcacagtgactacatgaacatgactccccgccgccccgggcccacccgcaagcattaccagccctatgccccaccacgcgacttcgcagcctatcgctcccgggtgaagttcagcagaagcgccgacgcccctgcctaccagcagggccagaatcagctgtacaacgagctgaacctgggcagaagggaagagtacgacgtcctggataagcggagaggccgggaccctgagatgggcggcaagcctcggcggaagaacccccaggaaggcctgtataacgaactgcagaaagacaagatggccgaggcctacagcgagatcggcatgaagggcgagcggaggcggggcaagggccacgacggcctgtatcagggcctgtccaccgccaccaaggatacctacgacgccctgcacatgcaggccctgcccccaaggaagcttaattgagcggccgcgctttatttgtgaaatttgtgatgctattgctttatttgtaaccattataagctgcaataaacaagttaacaacaacaattgcattcattttatgtttcaggttcagggggagatgtgggaggttttttaaagctcaccgattttgattctcaaacaaatgtgtcacaaagtaaggattctgatgtgtatatcacagacaaaactgtgctagacatgaggtctatggacttcaagagcaacagtgctgtggcctggagcaacaaatctgactttgcatgtgcaaacgccttcaacaacagcattattccagaagacaccttcttccccagcccaggtaagggcagctttggtgccttcgcaggctgtttccttgcttcaggaatggccaggttctgcccagagctctggtcaatgatgtctaaaactcctctgattggtggtctcggc

SEQ ID NO: 1422 - DNA, 7013 bp, Artificial Sequence
  TRAC-T4 guide specific AAV
gtagaaaagatcaaaggatcttcttgagatcctttttttctgcgcgtaatctgctgcttgcaaacaaaaaaaccaccgctaccagcggtggtttgtttgccggatcaagagctaccaactctttttccgaaggtaactggcttcagcagagcgcagataccaaatactgtccttctagtgtagccgtagttaggccaccacttcaagaactctgtagcaccgcctacatacctcgctctgctaatcctgttaccagtggctgctgccagtggcgataagtcgtgtcttaccgggttggactcaagacgatagttaccggataaggcgcagcggtcgggctgaacggggggttcgtgcacacagcccagcttggagcgaacgacctacaccgaactgagatacctacagcgtgagctatgagaaagcgccacgcttcccgaagggagaaaggcggacaggtatccggtaagcggcagggtcggaacaggagagcgcacgagggagcttccagggggaaacgcctggtatctttatagtcctgtcgggtttcgccacctctgacttgagcgtcgatttttgtgatgctcgtcaggggggcggagcctatggaaaaacgccagcaacgcggcctttttacggttcctggccttttgctggccttttgctcacatgttctttcctgcgttatcccctgattctgtggataaccgtattaccgcctttgagtgagctgataccgctcgccgcagccgaacgaccgagcgcagcgagtcagtgagcgaggaagcggaagagcgcccaatacgcaaaccgcctctccccgcgcgttggccgattcattaatgcagctgcgcgctcgctcgctcactgaggccgcccgggcaaagcccgggcgtcgggcgacctttggtcgcccggcctcagtgagcgagcgagcgcgcagagagggagtggccaactccatcactaggggttccttgtagttaatgattaacccgccatgctacttatctacgtagcggccgcactgaaatcatggcctcttggccaagattgatagcttgtgcctgtccctgagtcccagtccatcacgagcagctggtttctaagatgctatttcccgtataaagcatgagaccgtgacttgccagccccacagagccccgcccttgtccatcactggcatctggactccagcctgggttggggcaaagagggaaatgagatcatgtcctaaccctgatcctcttgtcccacagatatccagaaccctgaccctgccgtgtaccagctgagagactctaaatccagtgacaagtctgtctgcctatattaaggaacagagaaacaggagaatatgggccaaacaggatatctgtggtaagcagttcctgccccggctcagggccaagaacagttggaacagcagaatatgggccaaacaggatatctgtggtaagcagttcctgccccggctcagggccaagaacagatggtccccagatgcggtcccgccctcagcagtttctagagaaccatcagatgtttccagggtgccccaaggacctgaaatgaccctgtgccttatttgaactaaccaatcagttcgcttctcgcttctgttcgcgcgcttctgctccccgagctctatataagcagagctcgtttagtgaaccgtcagatcgcctggagacgccatccacgctgttttgacttccatagaaggatcgactcgagtaatgcctctgggcctgctgtggctgggcctggccctgctgggcgccctgcacgcccaggccggcgtgcaggtggagacaatctccccaggcgacggacgcacattccctaagcggggccagacctgcgtggtgcactatacaggcatgctggaggatggcaagaagtttgacagctcccgggatagaaacaagccattcaagtttatgctgggcaagcaggaagtgatcagaggctgggaggagggcgtggcccagatgtctgtgggccagagggccaagctgaccatcagcccagactacgcctatggagcaacaggccacccaggaatcatcccacctcacgccaccctggtgttcgatgtggagctgctgaagctgggcgagggatccaacacatcaaaagagaacccctttctgttcgcattggaggccgtagtcatatctgttggatccatgggacttattatctccctgttgtgtgtgtacttctggctggaacggactatgcccaggatccccacgctcaagaatctggaagatctcgtcacagaataccatggtaatttcagcgcctggagcggagtctctaagggtctggccgaatccctccaacccgattattctgaacggttgtgcctcgtatccgaaataccaccaaaaggcggggctctgggtgagggcccaggggcgagtccgtgcaatcaacacagcccgtattgggcccctccttgttatacgttgaagcccgaaactggaagcggagcgactaacttttctctgcttaaacaggcaggcgatgtcgaggaaaaccctggaccgactagtatggctctgcctgtgacagctctgctgctgcctctggccctgctgctccatgccgccagacccggatcccaggtacagctcgttcaatctggggctgaagtaaaaaagcctggagcgtctgtaaaggtatcttgcaaagcgagcggctacacattcacaagttatcacatccaatgggtgagacaggccccaggacaacgcttggagtggatggggtggatttaccctggcgacggcagcacacagtacaatgagaaatttaaaggccgggtgactatcactcgggacacctccgccagcacggcttatatggagcttagcagtttgagatccgaagatacagcggtatattactgcgcgagagaaggaacgtactacgctatggactattggggtcagggcacaaccgttacagtctcctctgtggacagctccggaggtgggggttcaggagggggtggaagcggtggtggtggcagtacaagcgatatagtaatgacccaaaccccgctctctctgagcgtcacgccaggacaaccagcatcaatctcttgccgcagtagtcaatccatcgttcactctaatggaaacacataccttgagtggtatcttcagaaaccaggtcagagccctcagctcctcatctataaagtctctaaccggttctcaggtgttccggaccggttcagtggttccggctcaggaacagacttcaccttgaagatcagtcgagtagaagccgaagacgtgggtgtatattattgctttcagggttcccacgttccgcgcaccttcggcggcgggaccaaagttgagatcaaagctagcgccaagcctaccaccacccctgcccctagacctccaacacccgccccaacaatcgccagccagcctctgtctctgaggcccgaggcttgtagaccagctgctggcggagccgtacacaccagaggactggatttcgcctgcgacttttgggtgctggtggtggttggtggagtcctggcttgctatagcttgctagtaacagtggcctttattattttctgggtgatgcataagcttaattgagcggccgcgctttatttgtgaaatttgtgatgctattgctttatttgtaaccattataagctgcaataaacaagttaacaacaacaattgcattcattttatgtttcaggttcagggggagatgtgggaggttttttaaagctcaccgattttgattctcaaacaaatgtgtcacaaagtaaggattctgatgtgtatatcacagacaaaactgtgctagacatgaggtctatggacttcaagagcaacagtgctgtggcctggagcaacaaatctgactttgcatgtgcaaacgccttcaacaacagcattattccagaagacaccttcttccccagcccaggtaagggcagctttggtgccttcgcaggctgtttccttgcttcaggaatggccaggttctgcccagagctctggtcaatgatgtctaaaactcctctgattggtggtctcggcgcggccgctacgtagataagtagcatggcgggttaatcattaactacaaggaacccctagtgatggagttggccactccctctctgcgcgctcgctcgctcactgaggccgggcgaccaaaggtcgcccgacgcccgggctttgcccgggcggcctcagtgagcgagcgagcgcgccagctggcgtaatagcgaagaggcccgcaccgatcgcccttcccaacagttgcgcagcctgaatggcgaatggcgattccgttgcaatggctggcggtaatattgttctggatattaccagcaaggccgatagtttgagttcttctactcaggcaagtgatgttattactaatcaaagaagtattgcgacaacggttaatttgcgtgatggacagactcttttactcggtggcctcactgattataaaaacacttctcaggattctggcgtaccgttcctgtctaaaatccctttaatcggcctcctgtttagctcccgctctgattctaacgaggaaagcacgttatacgtgctcgtcaaagcaaccatagtacgcgccctgtagcggcgcattaagcgcggcgggtgtggtggttacgcgcagcgtgaccgctacacttgccagcgccctagcgcccgctcctttcgctttcttcccttcctttctcgccacgttcgccggctttccccgtcaagctctaaatcgggggctccctttagggttccgatttagtgctttacggcacctcgaccccaaaaaacttgattagggtgatggttcacgtagtgggccatcgccctgatagacggtttttcgccctttgacgttggagtccacgttctttaatagtggactcttgttccaaactggaacaacactcaaccctatctcggtctattcttttgatttataagggattttgccgatttcggcctattggttaaaaaatgagctgatttaacaaaaatttaacgcgaattttaacaaaatattaacgtttacaatttaaatatttgcttatacaatcttcctgtttttggggcttttctgattatcaaccggggtacatatgattgacatgctagttttacgattaccgttcatcgattctcttgtttgctccagactctcaggcaatgacctgatagcctttgtagagacctctcaaaaatagctaccctctccggcatgaatttatcagctagaacggttgaatatcatattgatggtgatttgactgtctccggcctttctcacccgtttgaatctttacctacacattactcaggcattgcatttaaaatatatgagggttctaaaaatttttatccttgcgttgaaataaaggcttctcccgcaaaagtattacagggtcataatgtttttggtacaaccgatttagctttatgctctgaggctttattgcttaattttgctaattctttgccttgcctgtatgatttattggatgttggaatcgcctgatgcggtattttctccttacgcatctgtgcggtatttcacaccgcatatggtgcactctcagtacaatctgctctgatgccgcatagttaagccagccccgacacccgccaacacccgctgacgcgccctgacgggcttgtctgctcccggcatccgcttacagacaagctgtgaccgtctccgggagctgcatgtgtcagaggttttcaccgtcatcaccgaaacgcgcgagacgaaagggcctcgtgatacgcctatttttataggttaatgtcatgataataatggtttcttagacgtcaggtggcacttttcggggaaatgtgcgcggaacccctatttgtttatttttctaaatacattcaaatatgtatccgctcatgagacaataaccctgataaatgcttcaataatattgaaaaaggaagagtatgagtattcaacatttccgtgtcgcccttattcccttttttgcggcattttgccttcctgtttttgctcacccagaaacgctggtgaaagtaaaagatgctgaagatcagttgggtgcacgagtgggttacatcgaactggatctcaacagcggtaagatccttgagagttttcgccccgaagaacgttttccaatgatgagcacttttaaagttctgctatgtggcgcggtattatcccgtattgacgccgggcaagagcaactcggtcgccgcatacactattctcagaatgacttggttgagtactcaccagtcacagaaaagcatcttacggatggcatgacagtaagagaattatgcagtgctgccataaccatgagtgataacactgcggccaacttacttctgacaacgatcggaggaccgaaggagctaaccgcttttttgcacaacatgggggatcatgtaactcgccttgatcgttgggaaccggagctgaatgaagccataccaaacgacgagcgtgacaccacgatgcctgtagcaatggcaacaacgttgcgcaaactattaactggcgaactacttactctagcttcccggcaacaattaatagactggatggaggcggataaagttgcaggaccacttctgcgctcggcccttccggctggctggtttattgctgataaatctggagccggtgagcgtgggtctcgcggtatcattgcagcactggggccagatggtaagccctcccgtatcgtagttatctacacgacggggagtcaggcaactatggatgaacgaaatagacagatcgctgagataggtgcctcactgattaagcattggtaactgtcagaccaagtttactcatatatactttagattgatttaaaacttcatttttaatttaaaaggatctaggtgaagatcctttttgataatctcatgaccaaaatcccttaacgtgagttttcgttccactgagcgtcagacccc

SEQ ID NO: 1423 - DNA, 3066 bp, Artificial Sequence
  extracted sequence from 3408
cactgaaatcatggcctcttggccaagattgatagcttgtgcctgtccctgagtcccagtccatcacgagcagctggtttctaagatgctatttcccgtataaagcatgagaccgtgacttgccagccccacagagccccgcccttgtccatcactggcatctggactccagcctgggttggggcaaagagggaaatgagatcatgtcctaaccctgatcctcttgtcccacagatatccagaaccctgaccctgccgtgtaccagctgagagactctaaatccagtgacaagtctgtctgcctatattaaggaacagagaaacaggagaatatgggccaaacaggatatctgtggtaagcagttcctgccccggctcagggccaagaacagttggaacagcagaatatgggccaaacaggatatctgtggtaagcagttcctgccccggctcagggccaagaacagatggtccccagatgcggtcccgccctcagcagtttctagagaaccatcagatgtttccagggtgccccaaggacctgaaatgaccctgtgccttatttgaactaaccaatcagttcgcttctcgcttctgttcgcgcgcttctgctccccgagctctatataagcagagctcgtttagtgaaccgtcagatcgcctggagacgccatccacgctgttttgacttccatagaaggatcgactcgagtaatgcctctgggcctgctgtggctgggcctggccctgctgggcgccctgcacgcccaggccggcgtgcaggtggagacaatctccccaggcgacggacgcacattccctaagcggggccagacctgcgtggtgcactatacaggcatgctggaggatggcaagaagtttgacagctcccgggatagaaacaagccattcaagtttatgctgggcaagcaggaagtgatcagaggctgggaggagggcgtggcccagatgtctgtgggccagagggccaagctgaccatcagcccagactacgcctatggagcaacaggccacccaggaatcatcccacctcacgccaccctggtgttcgatgtggagctgctgaagctgggcgagggatccaacacatcaaaagagaacccctttctgttcgcattggaggccgtagtcatatctgttggatccatgggacttattatctccctgttgtgtgtgtacttctggctggaacggactatgcccaggatccccacgctcaagaatctggaagatctcgtcacagaataccatggtaatttcagcgcctggagcggagtctctaagggtctggccgaatccctccaacccgattattctgaacggttgtgcctcgtatccgaaataccaccaaaaggcggggctctgggtgagggcccaggggcgagtccgtgcaatcaacacagcccgtattgggcccctccttgttatacgttgaagcccgaaactggaagcggagcgactaacttttctctgcttaaacaggcaggcgatgtcgaggaaaaccctggaccgactagtatggctctgcctgtgacagctctgctgctgcctctggccctgctgctccatgccgccagacccggatcccaggtacagctcgttcaatctggggctgaagtaaaaaagcctggagcgtctgtaaaggtatcttgcaaagcgagcggctacacattcacaagttatcacatccaatgggtgagacaggccccaggacaacgcttggagtggatggggtggatttaccctggcgacggcagcacacagtacaatgagaaatttaaaggccgggtgactatcactcgggacacctccgccagcacggcttatatggagcttagcagtttgagatccgaagatacagcggtatattactgcgcgagagaaggaacgtactacgctatggactattggggtcagggcacaaccgttacagtctcctctgtggacagctccggaggtgggggttcaggagggggtggaagcggtggtggtggcagtacaagcgatatagtaatgacccaaaccccgctctctctgagcgtcacgccaggacaaccagcatcaatctcttgccgcagtagtcaatccatcgttcactctaatggaaacacataccttgagtggtatcttcagaaaccaggtcagagccctcagctcctcatctataaagtctctaaccggttctcaggtgttccggaccggttcagtggttccggctcaggaacagacttcaccttgaagatcagtcgagtagaagccgaagacgtgggtgtatattattgctttcagggttcccacgttccgcgcaccttcggcggcgggaccaaagttgagatcaaagctagcgccaagcctaccaccacccctgcccctagacctccaacacccgccccaacaatcgccagccagcctctgtctctgaggcccgaggcttgtagaccagctgctggcggagccgtacacaccagaggactggatttcgcctgcgacttttgggtgctggtggtggttggtggagtcctggcttgctatagcttgctagtaacagtggcctttattattttctgggtgatgcataagcttaattgagcggccgcgctttatttgtgaaatttgtgatgctattgctttatttgtaaccattataagctgcaataaacaagttaacaacaacaattgcattcattttatgtttcaggttcagggggagatgtgggaggttttttaaagctcaccgattttgattctcaaacaaatgtgtcacaaagtaaggattctgatgtgtatatcacagacaaaactgtgctagacatgaggtctatggacttcaagagcaacagtgctgtggcctggagcaacaaatctgactttgcatgtgcaaacgccttcaacaacagcattattccagaagacaccttcttccccagcccaggtaagggcagctttggtgccttcgcaggctgtttccttgcttcaggaatggccaggttctgcccagagctctggtcaatgatgtctaaaactcctctgattggtggtctcggc

SEQ ID NO: 1424 - DNA, 7553 bp, Artificial Sequence
  TRAC-T1 guide specific AAV
gtagaaaagatcaaaggatcttcttgagatcctttttttctgcgcgtaatctgctgcttgcaaacaaaaaaaccaccgctaccagcggtggtttgtttgccggatcaagagctaccaactctttttccgaaggtaactggcttcagcagagcgcagataccaaatactgtccttctagtgtagccgtagttaggccaccacttcaagaactctgtagcaccgcctacatacctcgctctgctaatcctgttaccagtggctgctgccagtggcgataagtcgtgtcttaccgggttggactcaagacgatagttaccggataaggcgcagcggtcgggctgaacggggggttcgtgcacacagcccagcttggagcgaacgacctacaccgaactgagatacctacagcgtgagctatgagaaagcgccacgcttcccgaagggagaaaggcggacaggtatccggtaagcggcagggtcggaacaggagagcgcacgagggagcttccagggggaaacgcctggtatctttatagtcctgtcgggtttcgccacctctgacttgagcgtcgatttttgtgatgctcgtcaggggggcggagcctatggaaaaacgccagcaacgcggcctttttacggttcctggccttttgctggccttttgctcacatgttctttcctgcgttatcccctgattctgtggataaccgtattaccgcctttgagtgagctgataccgctcgccgcagccgaacgaccgagcgcagcgagtcagtgagcgaggaagcggaagagcgcccaatacgcaaaccgcctctccccgcgcgttggccgattcattaatgcagctgcgcgctcgctcgctcactgaggccgcccgggcaaagcccgggcgtcgggcgacctttggtcgcccggcctcagtgagcgagcgagcgcgcagagagggagtggccaactccatcactaggggttccttgtagttaatgattaacccgccatgctacttatctacgtagcggccgcctattaaataaaagaataagcagtattattaagtagccctgcatttcaggtttccttgagtggcaggccaggcctggccgtgaacgttcactgaaatcatggcctcttggccaagattgatagcttgtgcctgtccctgagtcccagtccatcacgagcagctggtttctaagatgctatttcccgtataaagcatgagaccgtgacttgccagccccacagagccccgcccttgtccatcactggcatctggactccagcctgggttggggcaaagagggaaatgagatcatgtcctaaccctgatcctcttgtcccacagatatccagaaccctgaccctgccattaagtagaacagagaaacaggagaatatgggccaaacaggatatctgtggtaagcagttcctgccccggctcagggccaagaacagttggaacagcagaatatgggccaaacaggatatctgtggtaagcagttcctgccccggctcagggccaagaacagatggtccccagatgcggtcccgccctcagcagtttctagagaaccatcagatgtttccagggtgccccaaggacctgaaatgaccctgtgccttatttgaactaaccaatcagttcgcttctcgcttctgttcgcgcgcttctgctccccgagctctatataagcagagctcgtttagtgaaccgtcagatcgcctggagacgccatccacgctgttttgacttccatagaaggatcgactcgagtaatgcctctgggcctgctgtggctgggcctggccctgctgggcgccctgcacgcccaggccggcgtgcaggtggagacaatctccccaggcgacggacgcacattccctaagcggggccagacctgcgtggtgcactatacaggcatgctggaggatggcaagaagtttgacagctcccgggatagaaacaagccattcaagtttatgctgggcaagcaggaagtgatcagaggctgggaggagggcgtggcccagatgtctgtgggccagagggccaagctgaccatcagcccagactacgcctatggagcaacaggccacccaggaatcatcccacctcacgccaccctggtgttcgatgtggagctgctgaagctgggcgagggatccaacacatcaaaagagaacccctttctgttcgcattggaggccgtagtcatatctgttggatccatgggacttattatctccctgttgtgtgtgtacttctggctggaacggactatgcccaggatccccacgctcaagaatctggaagatctcgtcacagaataccatggtaatttcagcgcctggagcggagtctctaagggtctggccgaatccctccaacccgattattctgaacggttgtgcctcgtatccgaaataccaccaaaaggcggggctctgggtgagggcccaggggcgagtccgtgcaatcaacacagcccgtattgggcccctccttgttatacgttgaagcccgaaactggaagcggagcgactaacttttctctgcttaaacaggcaggcgatgtcgaggaaaaccctggaccgactagtatggctctgcctgtgacagctctgctgctgcctctggccctgctgctccatgccgccagacccggatcccaggtacagctcgttcaatctggggctgaagtaaaaaagcctggagcgtctgtaaaggtatcttgcaaagcgagcggctacacattcacaagttatcacatccaatgggtgagacaggccccaggacaacgcttggagtggatggggtggatttaccctggcgacggcagcacacagtacaatgagaaatttaaaggccgggtgactatcactcgggacacctccgccagcacggcttatatggagcttagcagtttgagatccgaagatacagcggtatattactgcgcgagagaaggaacgtactacgctatggactattggggtcagggcacaaccgttacagtctcctctgtggacagctccggaggtgggggttcaggagggggtggaagcggtggtggtggcagtacaagcgatatagtaatgacccaaaccccgctctctctgagcgtcacgccaggacaaccagcatcaatctcttgccgcagtagtcaatccatcgttcactctaatggaaacacataccttgagtggtatcttcagaaaccaggtcagagccctcagctcctcatctataaagtctctaaccggttctcaggtgttccggaccggttcagtggttccggctcaggaacagacttcaccttgaagatcagtcgagtagaagccgaagacgtgggtgtatattattgctttcagggttcccacgttccgcgcaccttcggcggcgggaccaaagttgagatcaaagctagcgccaagcctaccaccacccctgcccctagacctccaacacccgccccaacaatcgccagccagcctctgtctctgaggcccgaggcttgtagaccagctgctggcggagccgtacacaccagaggactggatttcgcctgcgacttttgggtgctggtggtggttggtggagtcctggcttgctatagcttgctagtaacagtggcctttattattttctgggtgatgcataggagtaagaggagcaggctcctgcacagtgactacatgaacatgactccccgccgccccgggcccacccgcaagcattaccagccctatgccccaccacgcgacttcgcagcctatcgctcccgggtgaagttcagcagaagcgccgacgcccctgcctaccagcagggccagaatcagctgtacaacgagctgaacctgggcagaagggaagagtacgacgtcctggataagcggagaggccgggaccctgagatgggcggcaagcctcggcggaagaacccccaggaaggcctgtataacgaactgcagaaagacaagatggccgaggcctacagcgagatcggcatgaagggcgagcggaggcggggcaagggccacgacggcctgtatcagggcctgtccaccgccaccaaggatacctacgacgccctgcacatgcaggccctgcccccaaggaagctttgagctttatttgtgaaatttgtgatgctattgctttatttgtaaccattataagctgcaataaacaagttaacaacaacaattgcattcattttatgtttcaggttcagggggagatgtgggaggttttttaaagcagtatatcagctgagagactctaaatccagtgacaagtctgtctgcctattcaccgattttgattctcaaacaaatgtgtcacaaagtaaggattctgatgtgtatatcacagacaaaactgtgctagacatgaggtctatggacttcaagagcaacagtgctgtggcctggagcaacaaatctgactttgcatgtgcaaacgccttcaacaacagcattattccagaagacaccttcttccccagcccaggtaagggcagctttggtgccttcgcaggctgtttccttgcttcaggaatggccaggttctgcccagagctctggtcaatgatgtctaaaactcctctgattggtggtctcggcgcggccgctacgtagataagtagcatggcgggttaatcattaactacaaggaacccctagtgatggagttggccactccctctctgcgcgctcgctcgctcactgaggccgggcgaccaaaggtcgcccgacgcccgggctttgcccgggcggcctcagtgagcgagcgagcgcgccagctggcgtaatagcgaagaggcccgcaccgatcgcccttcccaacagttgcgcagcctgaatggcgaatggcgattccgttgcaatggctggcggtaatattgttctggatattaccagcaaggccgatagtttgagttcttctactcaggcaagtgatgttattactaatcaaagaagtattgcgacaacggttaatttgcgtgatggacagactcttttactcggtggcctcactgattataaaaacacttctcaggattctggcgtaccgttcctgtctaaaatccctttaatcggcctcctgtttagctcccgctctgattctaacgaggaaagcacgttatacgtgctcgtcaaagcaaccatagtacgcgccctgtagcggcgcattaagcgcggcgggtgtggtggttacgcgcagcgtgaccgctacacttgccagcgccctagcgcccgctcctttcgctttcttcccttcctttctcgccacgttcgccggctttccccgtcaagctctaaatcgggggctccctttagggttccgatttagtgctttacggcacctcgaccccaaaaaacttgattagggtgatggttcacgtagtgggccatcgccctgatagacggtttttcgccctttgacgttggagtccacgttctttaatagtggactcttgttccaaactggaacaacactcaaccctatctcggtctattcttttgatttataagggattttgccgatttcggcctattggttaaaaaatgagctgatttaacaaaaatttaacgcgaattttaacaaaatattaacgtttacaatttaaatatttgcttatacaatcttcctgtttttggggcttttctgattatcaaccggggtacatatgattgacatgctagttttacgattaccgttcatcgattctcttgtttgctccagactctcaggcaatgacctgatagcctttgtagagacctctcaaaaatagctaccctctccggcatgaatttatcagctagaacggttgaatatcatattgatggtgatttgactgtctccggcctttctcacccgtttgaatctttacctacacattactcaggcattgcatttaaaatatatgagggttctaaaaatttttatccttgcgttgaaataaaggcttctcccgcaaaagtattacagggtcataatgtttttggtacaaccgatttagctttatgctctgaggctttattgcttaattttgctaattctttgccttgcctgtatgatttattggatgttggaatcgcctgatgcggtattttctccttacgcatctgtgcggtatttcacaccgcatatggtgcactctcagtacaatctgctctgatgccgcatagttaagccagccccgacacccgccaacacccgctgacgcgccctgacgggcttgtctgctcccggcatccgcttacagacaagctgtgaccgtctccgggagctgcatgtgtcagaggttttcaccgtcatcaccgaaacgcgcgagacgaaagggcctcgtgatacgcctatttttataggttaatgtcatgataataatggtttcttagacgtcaggtggcacttttcggggaaatgtgcgcggaacccctatttgtttatttttctaaatacattcaaatatgtatccgctcatgagacaataaccctgataaatgcttcaataatattgaaaaaggaagagtatgagtattcaacatttccgtgtcgcccttattcccttttttgcggcattttgccttcctgtttttgctcacccagaaacgctggtgaaagtaaaagatgctgaagatcagttgggtgcacgagtgggttacatcgaactggatctcaacagcggtaagatccttgagagttttcgccccgaagaacgttttccaatgatgagcacttttaaagttctgctatgtggcgcggtattatcccgtattgacgccgggcaagagcaactcggtcgccgcatacactattctcagaatgacttggttgagtactcaccagtcacagaaaagcatcttacggatggcatgacagtaagagaattatgcagtgctgccataaccatgagtgataacactgcggccaacttacttctgacaacgatcggaggaccgaaggagctaaccgcttttttgcacaacatgggggatcatgtaactcgccttgatcgttgggaaccggagctgaatgaagccataccaaacgacgagcgtgacaccacgatgcctgtagcaatggcaacaacgttgcgcaaactattaactggcgaactacttactctagcttcccggcaacaattaatagactggatggaggcggataaagttgcaggaccacttctgcgctcggcccttccggctggctggtttattgctgataaatctggagccggtgagcgtgggtctcgcggtatcattgcagcactggggccagatggtaagccctcccgtatcgtagttatctacacgacggggagtcaggcaactatggatgaacgaaatagacagatcgctgagataggtgcctcactgattaagcattggtaactgtcagaccaagtttactcatatatactttagattgatttaaaacttcatttttaatttaaaaggatctaggtgaagatcctttttgataatctcatgaccaaaatcccttaacgtgagttttcgttccactgagcgtcagacccc

SEQ ID NO: 1425 - DNA, 3606 bp, Artificial Sequence
  extracted sequence from 3409
cctattaaataaaagaataagcagtattattaagtagccctgcatttcaggtttccttgagtggcaggccaggcctggccgtgaacgttcactgaaatcatggcctcttggccaagattgatagcttgtgcctgtccctgagtcccagtccatcacgagcagctggtttctaagatgctatttcccgtataaagcatgagaccgtgacttgccagccccacagagccccgcccttgtccatcactggcatctggactccagcctgggttggggcaaagagggaaatgagatcatgtcctaaccctgatcctcttgtcccacagatatccagaaccctgaccctgccattaagtagaacagagaaacaggagaatatgggccaaacaggatatctgtggtaagcagttcctgccccggctcagggccaagaacagttggaacagcagaatatgggccaaacaggatatctgtggtaagcagttcctgccccggctcagggccaagaacagatggtccccagatgcggtcccgccctcagcagtttctagagaaccatcagatgtttccagggtgccccaaggacctgaaatgaccctgtgccttatttgaactaaccaatcagttcgcttctcgcttctgttcgcgcgcttctgctccccgagctctatataagcagagctcgtttagtgaaccgtcagatcgcctggagacgccatccacgctgttttgacttccatagaaggatcgactcgagtaatgcctctgggcctgctgtggctgggcctggccctgctgggcgccctgcacgcccaggccggcgtgcaggtggagacaatctccccaggcgacggacgcacattccctaagcggggccagacctgcgtggtgcactatacaggcatgctggaggatggcaagaagtttgacagctcccgggatagaaacaagccattcaagtttatgctgggcaagcaggaagtgatcagaggctgggaggagggcgtggcccagatgtctgtgggccagagggccaagctgaccatcagcccagactacgcctatggagcaacaggccacccaggaatcatcccacctcacgccaccctggtgttcgatgtggagctgctgaagctgggcgagggatccaacacatcaaaagagaacccctttctgttcgcattggaggccgtagtcatatctgttggatccatgggacttattatctccctgttgtgtgtgtacttctggctggaacggactatgcccaggatccccacgctcaagaatctggaagatctcgtcacagaataccatggtaatttcagcgcctggagcggagtctctaagggtctggccgaatccctccaacccgattattctgaacggttgtgcctcgtatccgaaataccaccaaaaggcggggctctgggtgagggcccaggggcgagtccgtgcaatcaacacagcccgtattgggcccctccttgttatacgttgaagcccgaaactggaagcggagcgactaacttttctctgcttaaacaggcaggcgatgtcgaggaaaaccctggaccgactagtatggctctgcctgtgacagctctgctgctgcctctggccctgctgctccatgccgccagacccggatcccaggtacagctcgttcaatctggggctgaagtaaaaaagcctggagcgtctgtaaaggtatcttgcaaagcgagcggctacacattcacaagttatcacatccaatgggtgagacaggccccaggacaacgcttggagtggatggggtggatttaccctggcgacggcagcacacagtacaatgagaaatttaaaggccgggtgactatcactcgggacacctccgccagcacggcttatatggagcttagcagtttgagatccgaagatacagcggtatattactgcgcgagagaaggaacgtactacgctatggactattggggtcagggcacaaccgttacagtctcctctgtggacagctccggaggtgggggttcaggagggggtggaagcggtggtggtggcagtacaagcgatatagtaatgacccaaaccccgctctctctgagcgtcacgccaggacaaccagcatcaatctcttgccgcagtagtcaatccatcgttcactctaatggaaacacataccttgagtggtatcttcagaaaccaggtcagagccctcagctcctcatctataaagtctctaaccggttctcaggtgttccggaccggttcagtggttccggctcaggaacagacttcaccttgaagatcagtcgagtagaagccgaagacgtgggtgtatattattgctttcagggttcccacgttccgcgcaccttcggcggcgggaccaaagttgagatcaaagctagcgccaagcctaccaccacccctgcccctagacctccaacacccgccccaacaatcgccagccagcctctgtctctgaggcccgaggcttgtagaccagctgctggcggagccgtacacaccagaggactggatttcgcctgcgacttttgggtgctggtggtggttggtggagtcctggcttgctatagcttgctagtaacagtggcctttattattttctgggtgatgcataggagtaagaggagcaggctcctgcacagtgactacatgaacatgactccccgccgccccgggcccacccgcaagcattaccagccctatgccccaccacgcgacttcgcagcctatcgctcccgggtgaagttcagcagaagcgccgacgcccctgcctaccagcagggccagaatcagctgtacaacgagctgaacctgggcagaagggaagagtacgacgtcctggataagcggagaggccgggaccctgagatgggcggcaagcctcggcggaagaacccccaggaaggcctgtataacgaactgcagaaagacaagatggccgaggcctacagcgagatcggcatgaagggcgagcggaggcggggcaagggccacgacggcctgtatcagggcctgtccaccgccaccaaggatacctacgacgccctgcacatgcaggccctgcccccaaggaagctttgagctttatttgtgaaatttgtgatgctattgctttatttgtaaccattataagctgcaataaacaagttaacaacaacaattgcattcattttatgtttcaggttcagggggagatgtgggaggttttttaaagcagtatatcagctgagagactctaaatccagtgacaagtctgtctgcctattcaccgattttgattctcaaacaaatgtgtcacaaagtaaggattctgatgtgtatatcacagacaaaactgtgctagacatgaggtctatggacttcaagagcaacagtgctgtggcctggagcaacaaatctgactttgcatgtgcaaacgccttcaacaacagcattattccagaagacaccttcttccccagcccaggtaagggcagctttggtgccttcgcaggctgtttccttgcttcaggaatggccaggttctgcccagagctctggtcaatgatgtctaaaactcctctgattggtggtctcggc

SEQ ID NO: 1426 - DNA, 7094 bp, Artificial Sequence
  TRAC-T1 guide specific AAV
gtagaaaagatcaaaggatcttcttgagatcctttttttctgcgcgtaatctgctgcttgcaaacaaaaaaaccaccgctaccagcggtggtttgtttgccggatcaagagctaccaactctttttccgaaggtaactggcttcagcagagcgcagataccaaatactgtccttctagtgtagccgtagttaggccaccacttcaagaactctgtagcaccgcctacatacctcgctctgctaatcctgttaccagtggctgctgccagtggcgataagtcgtgtcttaccgggttggactcaagacgatagttaccggataaggcgcagcggtcgggctgaacggggggttcgtgcacacagcccagcttggagcgaacgacctacaccgaactgagatacctacagcgtgagctatgagaaagcgccacgcttcccgaagggagaaaggcggacaggtatccggtaagcggcagggtcggaacaggagagcgcacgagggagcttccagggggaaacgcctggtatctttatagtcctgtcgggtttcgccacctctgacttgagcgtcgatttttgtgatgctcgtcaggggggcggagcctatggaaaaacgccagcaacgcggcctttttacggttcctggccttttgctggccttttgctcacatgttctttcctgcgttatcccctgattctgtggataaccgtattaccgcctttgagtgagctgataccgctcgccgcagccgaacgaccgagcgcagcgagtcagtgagcgaggaagcggaagagcgcccaatacgcaaaccgcctctccccgcgcgttggccgattcattaatgcagctgcgcgctcgctcgctcactgaggccgcccgggcaaagcccgggcgtcgggcgacctttggtcgcccggcctcagtgagcgagcgagcgcgcagagagggagtggccaactccatcactaggggttccttgtagttaatgattaacccgccatgctacttatctacgtagcggccgcctattaaataaaagaataagcagtattattaagtagccctgcatttcaggtttccttgagtggcaggccaggcctggccgtgaacgttcactgaaatcatggcctcttggccaagattgatagcttgtgcctgtccctgagtcccagtccatcacgagcagctggtttctaagatgctatttcccgtataaagcatgagaccgtgacttgccagccccacagagccccgcccttgtccatcactggcatctggactccagcctgggttggggcaaagagggaaatgagatcatgtcctaaccctgatcctcttgtcccacagatatccagaaccctgaccctgccattaagtagaacagagaaacaggagaatatgggccaaacaggatatctgtggtaagcagttcctgccccggctcagggccaagaacagttggaacagcagaatatgggccaaacaggatatctgtggtaagcagttcctgccccggctcagggccaagaacagatggtccccagatgcggtcccgccctcagcagtttctagagaaccatcagatgtttccagggtgccccaaggacctgaaatgaccctgtgccttatttgaactaaccaatcagttcgcttctcgcttctgttcgcgcgcttctgctccccgagctctatataagcagagctcgtttagtgaaccgtcagatcgcctggagacgccatccacgctgttttgacttccatagaaggatcgactcgagtaatgcctctgggcctgctgtggctgggcctggccctgctgggcgccctgcacgcccaggccggcgtgcaggtggagacaatctccccaggcgacggacgcacattccctaagcggggccagacctgcgtggtgcactatacaggcatgctggaggatggcaagaagtttgacagctcccgggatagaaacaagccattcaagtttatgctgggcaagcaggaagtgatcagaggctgggaggagggcgtggcccagatgtctgtgggccagagggccaagctgaccatcagcccagactacgcctatggagcaacaggccacccaggaatcatcccacctcacgccaccctggtgttcgatgtggagctgctgaagctgggcgagggatccaacacatcaaaagagaacccctttctgttcgcattggaggccgtagtcatatctgttggatccatgggacttattatctccctgttgtgtgtgtacttctggctggaacggactatgcccaggatccccacgctcaagaatctggaagatctcgtcacagaataccatggtaatttcagcgcctggagcggagtctctaagggtctggccgaatccctccaacccgattattctgaacggttgtgcctcgtatccgaaataccaccaaaaggcggggctctgggtgagggcccaggggcgagtccgtgcaatcaacacagcccgtattgggcccctccttgttatacgttgaagcccgaaactggaagcggagcgactaacttttctctgcttaaacaggcaggcgatgtcgaggaaaaccctggaccgactagtatggctctgcctgtgacagctctgctgctgcctctggccctgctgctccatgccgccagacccggatcccaggtacagctcgttcaatctggggctgaagtaaaaaagcctggagcgtctgtaaaggtatcttgcaaagcgagcggctacacattcacaagttatcacatccaatgggtgagacaggccccaggacaacgcttggagtggatggggtggatttaccctggcgacggcagcacacagtacaatgagaaatttaaaggccgggtgactatcactcgggacacctccgccagcacggcttatatggagcttagcagtttgagatccgaagatacagcggtatattactgcgcgagagaaggaacgtactacgctatggactattggggtcagggcacaaccgttacagtctcctctgtggacagctccggaggtgggggttcaggagggggtggaagcggtggtggtggcagtacaagcgatatagtaatgacccaaaccccgctctctctgagcgtcacgccaggacaaccagcatcaatctcttgccgcagtagtcaatccatcgttcactctaatggaaacacataccttgagtggtatcttcagaaaccaggtcagagccctcagctcctcatctataaagtctctaaccggttctcaggtgttccggaccggttcagtggttccggctcaggaacagacttcaccttgaagatcagtcgagtagaagccgaagacgtgggtgtatattattgctttcagggttcccacgttccgcgcaccttcggcggcgggaccaaagttgagatcaaagctagcgccaagcctaccaccacccctgcccctagacctccaacacccgccccaacaatcgccagccagcctctgtctctgaggcccgaggcttgtagaccagctgctggcggagccgtacacaccagaggactggatttcgcctgcgacttttgggtgctggtggtggttggtggagtcctggcttgctatagcttgctagtaacagtggcctttattattttctgggtgatgcataagctttgagctttatttgtgaaatttgtgatgctattgctttatttgtaaccattataagctgcaataaacaagttaacaacaacaattgcattcattttatgtttcaggttcagggggagatgtgggaggttttttaaagcagtatatcagctgagagactctaaatccagtgacaagtctgtctgcctattcaccgattttgattctcaaacaaatgtgtcacaaagtaaggattctgatgtgtatatcacagacaaaactgtgctagacatgaggtctatggacttcaagagcaacagtgctgtggcctggagcaacaaatctgactttgcatgtgcaaacgccttcaacaacagcattattccagaagacaccttcttccccagcccaggtaagggcagctttggtgccttcgcaggctgtttccttgcttcaggaatggccaggttctgcccagagctctggtcaatgatgtctaaaactcctctgattggtggtctcggcgcggccgctacgtagataagtagcatggcgggttaatcattaactacaaggaacccctagtgatggagttggccactccctctctgcgcgctcgctcgctcactgaggccgggcgaccaaaggtcgcccgacgcccgggctttgcccgggcggcctcagtgagcgagcgagcgcgccagctggcgtaatagcgaagaggcccgcaccgatcgcccttcccaacagttgcgcagcctgaatggcgaatggcgattccgttgcaatggctggcggtaatattgttctggatattaccagcaaggccgatagtttgagttcttctactcaggcaagtgatgttattactaatcaaagaagtattgcgacaacggttaatttgcgtgatggacagactcttttactcggtggcctcactgattataaaaacacttctcaggattctggcgtaccgttcctgtctaaaatccctttaatcggcctcctgtttagctcccgctctgattctaacgaggaaagcacgttatacgtgctcgtcaaagcaaccatagtacgcgccctgtagcggcgcattaagcgcggcgggtgtggtggttacgcgcagcgtgaccgctacacttgccagcgccctagcgcccgctcctttcgctttcttcccttcctttctcgccacgttcgccggctttccccgtcaagctctaaatcgggggctccctttagggttccgatttagtgctttacggcacctcgaccccaaaaaacttgattagggtgatggttcacgtagtgggccatcgccctgatagacggtttttcgccctttgacgttggagtccacgttctttaatagtggactcttgttccaaactggaacaacactcaaccctatctcggtctattcttttgatttataagggattttgccgatttcggcctattggttaaaaaatgagctgatttaacaaaaatttaacgcgaattttaacaaaatattaacgtttacaatttaaatatttgcttatacaatcttcctgtttttggggcttttctgattatcaaccggggtacatatgattgacatgctagttttacgattaccgttcatcgattctcttgtttgctccagactctcaggcaatgacctgatagcctttgtagagacctctcaaaaatagctaccctctccggcatgaatttatcagctagaacggttgaatatcatattgatggtgatttgactgtctccggcctttctcacccgtttgaatctttacctacacattactcaggcattgcatttaaaatatatgagggttctaaaaatttttatccttgcgttgaaataaaggcttctcccgcaaaagtattacagggtcataatgtttttggtacaaccgatttagctttatgctctgaggctttattgcttaattttgctaattctttgccttgcctgtatgatttattggatgttggaatcgcctgatgcggtattttctccttacgcatctgtgcggtatttcacaccgcatatggtgcactctcagtacaatctgctctgatgccgcatagttaagccagccccgacacccgccaacacccgctgacgcgccctgacgggcttgtctgctcccggcatccgcttacagacaagctgtgaccgtctccgggagctgcatgtgtcagaggttttcaccgtcatcaccgaaacgcgcgagacgaaagggcctcgtgatacgcctatttttataggttaatgtcatgataataatggtttcttagacgtcaggtggcacttttcggggaaatgtgcgcggaacccctatttgtttatttttctaaatacattcaaatatgtatccgctcatgagacaataaccctgataaatgcttcaataatattgaaaaaggaagagtatgagtattcaacatttccgtgtcgcccttattcccttttttgcggcattttgccttcctgtttttgctcacccagaaacgctggtgaaagtaaaagatgctgaagatcagttgggtgcacgagtgggttacatcgaactggatctcaacagcggtaagatccttgagagttttcgccccgaagaacgttttccaatgatgagcacttttaaagttctgctatgtggcgcggtattatcccgtattgacgccgggcaagagcaactcggtcgccgcatacactattctcagaatgacttggttgagtactcaccagtcacagaaaagcatcttacggatggcatgacagtaagagaattatgcagtgctgccataaccatgagtgataacactgcggccaacttacttctgacaacgatcggaggaccgaaggagctaaccgcttttttgcacaacatgggggatcatgtaactcgccttgatcgttgggaaccggagctgaatgaagccataccaaacgacgagcgtgacaccacgatgcctgtagcaatggcaacaacgttgcgcaaactattaactggcgaactacttactctagcttcccggcaacaattaatagactggatggaggcggataaagttgcaggaccacttctgcgctcggcccttccggctggctggtttattgctgataaatctggagccggtgagcgtgggtctcgcggtatcattgcagcactggggccagatggtaagccctcccgtatcgtagttatctacacgacggggagtcaggcaactatggatgaacgaaatagacagatcgctgagataggtgcctcactgattaagcattggtaactgtcagaccaagtttactcatatatactttagattgatttaaaacttcatttttaatttaaaaggatctaggtgaagatcctttttgataatctcatgaccaaaatcccttaacgtgagttttcgttccactgagcgtcagacccc

SEQ ID NO: 1427 - DNA, 3147 bp, Artificial Sequence
  extracted sequence from 3410
cctattaaataaaagaataagcagtattattaagtagccctgcatttcaggtttccttgagtggcaggccaggcctggccgtgaacgttcactgaaatcatggcctcttggccaagattgatagcttgtgcctgtccctgagtcccagtccatcacgagcagctggtttctaagatgctatttcccgtataaagcatgagaccgtgacttgccagccccacagagccccgcccttgtccatcactggcatctggactccagcctgggttggggcaaagagggaaatgagatcatgtcctaaccctgatcctcttgtcccacagatatccagaaccctgaccctgccattaagtagaacagagaaacaggagaatatgggccaaacaggatatctgtggtaagcagttcctgccccggctcagggccaagaacagttggaacagcagaatatgggccaaacaggatatctgtggtaagcagttcctgccccggctcagggccaagaacagatggtccccagatgcggtcccgccctcagcagtttctagagaaccatcagatgtttccagggtgccccaaggacctgaaatgaccctgtgccttatttgaactaaccaatcagttcgcttctcgcttctgttcgcgcgcttctgctccccgagctctatataagcagagctcgtttagtgaaccgtcagatcgcctggagacgccatccacgctgttttgacttccatagaaggatcgactcgagtaatgcctctgggcctgctgtggctgggcctggccctgctgggcgccctgcacgcccaggccggcgtgcaggtggagacaatctccccaggcgacggacgcacattccctaagcggggccagacctgcgtggtgcactatacaggcatgctggaggatggcaagaagtttgacagctcccgggatagaaacaagccattcaagtttatgctgggcaagcaggaagtgatcagaggctgggaggagggcgtggcccagatgtctgtgggccagagggccaagctgaccatcagcccagactacgcctatggagcaacaggccacccaggaatcatcccacctcacgccaccctggtgttcgatgtggagctgctgaagctgggcgagggatccaacacatcaaaagagaacccctttctgttcgcattggaggccgtagtcatatctgttggatccatgggacttattatctccctgttgtgtgtgtacttctggctggaacggactatgcccaggatccccacgctcaagaatctggaagatctcgtcacagaataccatggtaatttcagcgcctggagcggagtctctaagggtctggccgaatccctccaacccgattattctgaacggttgtgcctcgtatccgaaataccaccaaaaggcggggctctgggtgagggcccaggggcgagtccgtgcaatcaacacagcccgtattgggcccctccttgttatacgttgaagcccgaaactggaagcggagcgactaacttttctctgcttaaacaggcaggcgatgtcgaggaaaaccctggaccgactagtatggctctgcctgtgacagctctgctgctgcctctggccctgctgctccatgccgccagacccggatcccaggtacagctcgttcaatctggggctgaagtaaaaaagcctggagcgtctgtaaaggtatcttgcaaagcgagcggctacacattcacaagttatcacatccaatgggtgagacaggccccaggacaacgcttggagtggatggggtggatttaccctggcgacggcagcacacagtacaatgagaaatttaaaggccgggtgactatcactcgggacacctccgccagcacggcttatatggagcttagcagtttgagatccgaagatacagcggtatattactgcgcgagagaaggaacgtactacgctatggactattggggtcagggcacaaccgttacagtctcctctgtggacagctccggaggtgggggttcaggagggggtggaagcggtggtggtggcagtacaagcgatatagtaatgacccaaaccccgctctctctgagcgtcacgccaggacaaccagcatcaatctcttgccgcagtagtcaatccatcgttcactctaatggaaacacataccttgagtggtatcttcagaaaccaggtcagagccctcagctcctcatctataaagtctctaaccggttctcaggtgttccggaccggttcagtggttccggctcaggaacagacttcaccttgaagatcagtcgagtagaagccgaagacgtgggtgtatattattgctttcagggttcccacgttccgcgcaccttcggcggcgggaccaaagttgagatcaaagctagcgccaagcctaccaccacccctgcccctagacctccaacacccgccccaacaatcgccagccagcctctgtctctgaggcccgaggcttgtagaccagctgctggcggagccgtacacaccagaggactggatttcgcctgcgacttttgggtgctggtggtggttggtggagtcctggcttgctatagcttgctagtaacagtggcctttattattttctgggtgatgcataagctttgagctttatttgtgaaatttgtgatgctattgctttatttgtaaccattataagctgcaataaacaagttaacaacaacaattgcattcattttatgtttcaggttcagggggagatgtgggaggttttttaaagcagtatatcagctgagagactctaaatccagtgacaagtctgtctgcctattcaccgattttgattctcaaacaaatgtgtcacaaagtaaggattctgatgtgtatatcacagacaaaactgtgctagacatgaggtctatggacttcaagagcaacagtgctgtggcctggagcaacaaatctgactttgcatgtgcaaacgccttcaacaacagcattattccagaagacaccttcttccccagcccaggtaagggcagctttggtgccttcgcaggctgtttccttgcttcaggaatggccaggttctgcccagagctctggtcaatgatgtctaaaactcctctgattggtggtctcggc

SEQ ID NO: 1428 - DNA, 20 bp, Artificial Sequence
  gRNA_2  (human TRAC editing)
tggatttagagtctctcagc

SEQ ID NO: 1429 - DNA, 20 bp, Artificial Sequence
  gRNA_3  (human TRAC editing)
ctctcagctggtacacggca

SEQ ID NO: 1430 - protein, 20 aa, Artificial Sequence
  IGRP epitope
QLYHFLQIPTHEEHLFYVLS

SEQ ID NO: 1431 - protein, 20 aa, Artificial Sequence
  IGRP epitope
KWCANPDWIHIDTTPFAGLV

SEQ ID NO: 1432 - protein, 20 aa, Artificial Sequence
  IGRP epitope
QLYHFLQIPTHEEHLFYVLS

SEQ ID NO: 1433 - protein, 20 aa, Artificial Sequence
  IGRP epitope
QLYHFLQIPTHEEHLFYVLS

SEQ ID NO: 1434 - protein, 20 aa, Artificial Sequence
  GAD65 epitope
KVNFFRMVISNPAATHQDID

SEQ ID NO: 1435 - protein, 20 aa, Artificial Sequence
  GAD65 epitope
KGMAALPRLIAFTSEHSHFS

SEQ ID NO: 1436 - protein, 15 aa, Artificial Sequence
  Preproinsulin epitope
SLQPLALEGSLQKRG

SEQ ID NO: 1437 - protein, 251 aa, Artificial Sequence
  IL2Rgamma-CISC polypeptide
MPLGLLWLGLALLGALHAQAGVQVETISPGDGRTFPKRGQTCVVHYTGMLEDGKKFDSSRDRNKPFKFMLGKQEVIRGWEEGVAQMSVGQRAKLTISPDYAYGATGHPGIIPPHATLVFDVELLKLGEGSNTSKENPFLFALEAVVISVGSMGLIISLLCVYFWLERTMPRIPTLKNLEDLVTEYHGNFSAWSGVSKGLAESLQPDYSERLCLVSEIPPKGGALGEGPGASPCNQHSPYWAPPCYTLKPET

SEQ ID NO: 1438 - protein, 90 aa, Artificial Sequence
  naked FRB wild-type polypeptide
MEMWHEGLEEASRLYFGERNVKGMFEVLEPLHAMMERGPQTLKETSFNQAYGRDLMEAQEWCRKYMKSGNVKDLTQAWDLYYHVFRRISK

SEQ ID NO: 1439 - protein, 90 aa, Artificial Sequence
  naked FRB mutant polypeptide
MEMWHEGLEEASRLYFGERNVKGMFEVLEPLHAMMERGPQTLKETSFNQAYGRDLMEAQEWCRKYMKSGNVKDLLQAWDLYYHVFRRISK

SEQ ID NO: 1440 - protein, 245 aa, Artificial Sequence
  FRB-CISC having a truncated intracellular IL2Rbeta domain
MALPVTALLLPLALLLHAARPILWHEMWHEGLEEASRLYFGERNVKGMFEVLEPLHAMMERGPQTLKETSFNQAYGRDLMEAQEWCRKYMKSGNVKDLLQAWDLYYHVFRRISKPAALGKDTIPWLGHLLVGLSGAFGFIILVYLLINCRNTGPWLKKVLKCNTPDPSKFFSQLSSEHGGDVQKWLSSPFPSSSFSPGGLAPEISPLEVLERDKVTQLLLQQDKVPEPASLSLNTDAYLSLQELQ

SEQ ID NO: 1441 - protein, 131 aa, Artificial Sequence
  truncated IL2Rbeta
PAALGKDTIPWLGHLLVGLSGAFGFIILVYLLINCRNTGPWLKKVLKCNTPDPSKFFSQLSSEHGGDVQKWLSSPFPSSSFSPGGLAPEISPLEVLERDKVTQLLLQQDKVPEPASLSLNTDAYLSLQELQ

SEQ ID NO: 1442 - DNA, 6498 bp, Artificial Sequence
  Construct 3324
gtagaaaagatcaaaggatcttcttgagatcctttttttctgcgcgtaatctgctgcttgcaaacaaaaaaaccaccgctaccagcggtggtttgtttgccggatcaagagctaccaactctttttccgaaggtaactggcttcagcagagcgcagataccaaatactgtccttctagtgtagccgtagttaggccaccacttcaagaactctgtagcaccgcctacatacctcgctctgctaatcctgttaccagtggctgctgccagtggcgataagtcgtgtcttaccgggttggactcaagacgatagttaccggataaggcgcagcggtcgggctgaacggggggttcgtgcacacagcccagcttggagcgaacgacctacaccgaactgagatacctacagcgtgagctatgagaaagcgccacgcttcccgaagggagaaaggcggacaggtatccggtaagcggcagggtcggaacaggagagcgcacgagggagcttccagggggaaacgcctggtatctttatagtcctgtcgggtttcgccacctctgacttgagcgtcgatttttgtgatgctcgtcaggggggcggagcctatggaaaaacgccagcaacgcggcctttttacggttcctggccttttgctggccttttgctcacatgttctttcctgcgttatcccctgattctgtggataaccgtattaccgcctttgagtgagctgataccgctcgccgcagccgaacgaccgagcgcagcgagtcagtgagcgaggaagcggaagagcgcccaatacgcaaaccgcctctccccgcgcgttggccgattcattaatgcagctgcgcgctcgctcgctcactgaggccgcccgggcaaagcccgggcgtcgggcgacctttggtcgcccggcctcagtgagcgagcgagcgcgcagagagggagtggccaactccatcactaggggttccttgtagttaatgattaacccgccatgctacttatctacgtagcggccgcagcctgtgcagggtgcagggagggctagaggcctgaggcttgaaacagctctcaagtggagggggaaacaaccattgccctcatagaggacacatccacaccagggctgtgctagcgtgggcaggcaagccaggtgctggacctctgcacgtggggcatgtgtgggtatgtacatgtacctgtgttcttggtgtgtgtgtgtgtgtgtgtgtgtgtgtgtgtctagagctggggtgcaactatggggcccctcgggacatgtcccagccaatgcctgctttgaccagaggagtgtccacgtggctcaggtggtcgagtatctcataccgccctagcacacgtgtgactcctttcccctattgtctacgcagcctgcccttggacaaggacccgatgcccaaccccaggcctggcaagccctcggccccttccttggcccttggcccatccccacgcgtaggaacagagaaacaggagaatatgggccaaacaggatatctgtggtaagcagttcctgccccggctcagggccaagaacagttggaacagcagaatatgggccaaacaggatatctgtggtaagcagttcctgccccggctcagggccaagaacagatggtccccagatgcggtcccgccctcagcagtttctagagaaccatcagatgtttccagggtgccccaaggacctgaaatgaccctgtgccttatttgaactaaccaatcagttcgcttctcgcttctgttcgcgcgcttctgctccccgagctctatataagcagagctcgtttagtgaaccgtcagatcgcctggagacgccatccacgctgttttgacttccatagaaggatctcgaggccaccatgccactgggactgctgtggcttggactggcccttcttggagcactgcatgctcaggctggcgtgcaggtcgagacaattagtcctggcgacggccggacctttcctaagcgaggacagacatgcgtggtgcactacaccggcatgctggaagatggcaagaagttcgacagcagccgggacagaaacaagcctttcaagttcatgctgggcaagcaagaagtgatcagaggctgggaagagggcgtcgcccagatgtctgttggacagagagccaagctgacaatcagccccgattacgcctatggcgccacaggacaccctgggatcattcctccacatgccacactggtgttcgatgtggaactgctgaagctcggcgaaggcagcaataccagcaaagagaaccccttcctgttcgccctggaagccgtggttatcagcgtgggatctatgggcctgatcatctccctgctgtgcgtgtacttctggctggaacggaccatgcctcggatccccacactgaagaatctggaagatctggtcaccgagtaccacggcaatttcagcgcttggagtggcgtgtccaaaggcctggctgaaagcctgcagcctgactactctgagagactgtgcctggtgtctgagatccctcctaaaggcggcgctctcggagaaggaccaggcgcttctccatgcaatcagcacagcccttattgggcccctccttgctacaccctgaagcctgaaactggatccggcgccaccaactttagtctgctcaagcaagccggggacgtcgaggaaaatcctgggccagaaatgtggcacgaaggactcgaggaagccagtcggctgtattttggcgagcggaatgtgaaagggatgtttgaagtgctcgagcctctccacgctatgatggaacggggaccccagactctcaaagaaaccagctttaatcaggcttacggacgcgacctcatggaagctcaagaatggtgtagaaagtatatgaagagtggcaacgtgaaagatctgctgcaagcctgggatctctattatcacgtgttcagacgcatcagcaaaggcagcggcgccacaaatttctccctgctgaaacaggccggcgacgtggaagagaatcccggaccttatccatacgatgtcccagattatgcgcccaatcctagacctggcaagcccagcgctccttctcttgctcttggaccttctcctggtgcctcgcccagctggagggctgcacccaaagcctcagacctgctgggggcccggggcccagggggaaccttccagggccgagatcttcgaggcggggcccatgcctcctcttcttccttgaaccccatgccaccatcgcagctgcaggtgaggccctgggcccaggatggggcaggcagggtggggtacctggacctacaggtgccgacctttactgtggcactgggcgggaggggggctggctggggcacaggaagtggtttctgggtcccaggcaagtctgtgacttatgcagatgttgcagggccaagaaaatccccacctgccaggcctcagagattggaggctctccccgacctcccaatccctgtctcaggagaggaggaggccgtattgtagtcccatgagcatagctatgtgtccccatccccatgtgacaagagaagaggaggatcctacgtagataagtagcatggcgggttaatcattaactacaaggaacccctagtgatggagttggccactccctctctgcgcgctcgctcgctcactgaggccgggcgaccaaaggtcgcccgacgcccgggctttgcccgggcggcctcagtgagcgagcgagcgcgccagctggcgtaatagcgaagaggcccgcaccgatcgcccttcccaacagttgcgcagcctgaatggcgaatggcgattccgttgcaatggctggcggtaatattgttctggatattaccagcaaggccgatagtttgagttcttctactcaggcaagtgatgttattactaatcaaagaagtattgcgacaacggttaatttgcgtgatggacagactcttttactcggtggcctcactgattataaaaacacttctcaggattctggcgtaccgttcctgtctaaaatccctttaatcggcctcctgtttagctcccgctctgattctaacgaggaaagcacgttatacgtgctcgtcaaagcaaccatagtacgcgccctgtagcggcgcattaagcgcggcgggtgtggtggttacgcgcagcgtgaccgctacacttgccagcgccctagcgcccgctcctttcgctttcttcccttcctttctcgccacgttcgccggctttccccgtcaagctctaaatcgggggctccctttagggttccgatttagtgctttacggcacctcgaccccaaaaaacttgattagggtgatggttcacgtagtgggccatcgccctgatagacggtttttcgccctttgacgttggagtccacgttctttaatagtggactcttgttccaaactggaacaacactcaaccctatctcggtctattcttttgatttataagggattttgccgatttcggcctattggttaaaaaatgagctgatttaacaaaaatttaacgcgaattttaacaaaatattaacgtttacaatttaaatatttgcttatacaatcttcctgtttttggggcttttctgattatcaaccggggtacatatgattgacatgctagttttacgattaccgttcatcgattctcttgtttgctccagactctcaggcaatgacctgatagcctttgtagagacctctcaaaaatagctaccctctccggcatgaatttatcagctagaacggttgaatatcatattgatggtgatttgactgtctccggcctttctcacccgtttgaatctttacctacacattactcaggcattgcatttaaaatatatgagggttctaaaaatttttatccttgcgttgaaataaaggcttctcccgcaaaagtattacagggtcataatgtttttggtacaaccgatttagctttatgctctgaggctttattgcttaattttgctaattctttgccttgcctgtatgatttattggatgttggaatcgcctgatgcggtattttctccttacgcatctgtgcggtatttcacaccgcatatggtgcactctcagtacaatctgctctgatgccgcatagttaagccagccccgacacccgccaacacccgctgacgcgccctgacgggcttgtctgctcccggcatccgcttacagacaagctgtgaccgtctccgggagctgcatgtgtcagaggttttcaccgtcatcaccgaaacgcgcgagacgaaagggcctcgtgatacgcctatttttataggttaatgtcatgataataatggtttcttagacgtcaggtggcacttttcggggaaatgtgcgcggaacccctatttgtttatttttctaaatacattcaaatatgtatccgctcatgagacaataaccctgataaatgcttcaataatattgaaaaaggaagagtatgagtattcaacatttccgtgtcgcccttattcccttttttgcggcattttgccttcctgtttttgctcacccagaaacgctggtgaaagtaaaagatgctgaagatcagttgggtgcacgagtgggttacatcgaactggatctcaacagcggtaagatccttgagagttttcgccccgaagaacgttttccaatgatgagcacttttaaagttctgctatgtggcgcggtattatcccgtattgacgccgggcaagagcaactcggtcgccgcatacactattctcagaatgacttggttgagtactcaccagtcacagaaaagcatcttacggatggcatgacagtaagagaattatgcagtgctgccataaccatgagtgataacactgcggccaacttacttctgacaacgatcggaggaccgaaggagctaaccgcttttttgcacaacatgggggatcatgtaactcgccttgatcgttgggaaccggagctgaatgaagccataccaaacgacgagcgtgacaccacgatgcctgtagcaatggcaacaacgttgcgcaaactattaactggcgaactacttactctagcttcccggcaacaattaatagactggatggaggcggataaagttgcaggaccacttctgcgctcggcccttccggctggctggtttattgctgataaatctggagccggtgagcgtgggtctcgcggtatcattgcagcactggggccagatggtaagccctcccgtatcgtagttatctacacgacggggagtcaggcaactatggatgaacgaaatagacagatcgctgagataggtgcctcactgattaagcattggtaactgtcagaccaagtttactcatatatactttagattgatttaaaacttcatttttaatttaaaaggatctaggtgaagatcctttttgataatctcatgaccaaaatcccttaacgtgagttttcgttccactgagcgtcagacccc

SEQ ID NO: 1443 - DNA, 7663 bp, Artificial Sequence
  Construct 3333
gtagaaaagatcaaaggatcttcttgagatcctttttttctgcgcgtaatctgctgcttgcaaacaaaaaaaccaccgctaccagcggtggtttgtttgccggatcaagagctaccaactctttttccgaaggtaactggcttcagcagagcgcagataccaaatactgtccttctagtgtagccgtagttaggccaccacttcaagaactctgtagcaccgcctacatacctcgctctgctaatcctgttaccagtggctgctgccagtggcgataagtcgtgtcttaccgggttggactcaagacgatagttaccggataaggcgcagcggtcgggctgaacggggggttcgtgcacacagcccagcttggagcgaacgacctacaccgaactgagatacctacagcgtgagctatgagaaagcgccacgcttcccgaagggagaaaggcggacaggtatccggtaagcggcagggtcggaacaggagagcgcacgagggagcttccagggggaaacgcctggtatctttatagtcctgtcgggtttcgccacctctgacttgagcgtcgatttttgtgatgctcgtcaggggggcggagcctatggaaaaacgccagcaacgcggcctttttacggttcctggccttttgctggccttttgctcacatgttctttcctgcgttatcccctgattctgtggataaccgtattaccgcctttgagtgagctgataccgctcgccgcagccgaacgaccgagcgcagcgagtcagtgagcgaggaagcggaagagcgcccaatacgcaaaccgcctctccccgcgcgttggccgattcattaatgcagctgcgcgctcgctcgctcactgaggccgcccgggcaaagcccgggcgtcgggcgacctttggtcgcccggcctcagtgagcgagcgagcgcgcagagagggagtggccaactccatcactaggggttccttgtagttaatgattaacccgccatgctacttatctacgtagcggccgcactgaaatcatggcctcttggccaagattgatagcttgtgcctgtccctgagtcccagtccatcacgagcagctggtttctaagatgctatttcccgtataaagcatgagaccgtgacttgccagccccacagagccccgcccttgtccatcactggcatctggactccagcctgggttggggcaaagagggaaatgagatcatgtcctaaccctgatcctcttgtcccacagatatccagaaccctgaccctgccgtgtaccagctgagagactctaaatccagtgacaagtctgtctgcctatattaaggaacagagaaacaggagaatatgggccaaacaggatatctgtggtaagcagttcctgccccggctcagggccaagaacagttggaacagcagaatatgggccaaacaggatatctgtggtaagcagttcctgccccggctcagggccaagaacagatggtccccagatgcggtcccgccctcagcagtttctagagaaccatcagatgtttccagggtgccccaaggacctgaaatgaccctgtgccttatttgaactaaccaatcagttcgcttctcgcttctgttcgcgcgcttctgctccccgagctctatataagcagagctcgtttagtgaaccgtcagatcgcctggagacgccatccacgctgttttgacttccatagaaggatctcgagtagcatgggatcaagactgctgtgctgggtgctgctgtgcctgctgggagccggacctgtgaaagccggggtgactcagactccacgatacctgatcaagaccaggggccagcaggtgacactgtcttgcagcccaatctccggacaccgctccgtgtcttggtaccagcagacccctggacagggactgcagttcctgtttgagtatttctctgagacacagcggaacaagggcaatttccccggccggtttagcggcagacagtttagcaactccaggtctgagatgaatgtgagcaccctggagctgggcgactccgccctgtacctgtgcgcaagctccctggccctgggacaggggaatcagcagtttttcggacccggaacaaggctgaccgtgctggaggatctacgtaacgtgacaccacccaaagtctcactgtttgagcctagcaaggcagaaattgccaacaagcagaaggccaccctggtgtgcctggcaagagggttctttccagatcacgtggagctgtcctggtgggtcaacggcaaagaagtgcattctggggtctgcaccgacccccaggcttacaaggagagtaattactcatattgtctgtcaagccggctgagagtgtccgccacattctggcacaaccctaggaatcatttccgctgccaggtccagtttcacggcctgagtgaggaagataaatggccagaggggtcacctaagccagtgacacagaacatcagcgcagaagcctggggacgagcagactgtggcattactagcgcctcctatcatcagggcgtgctgagcgccactatcctgtacgagattctgctgggaaaggccaccctgtatgctgtgctggtctccggcctggtgctgatggccatggtcaagaaaaagaactctgggagtggagccacaaatttctctctgctgaaacaggctggagatgtggaggaaaaccccggccctatgaagagcctgcgcgtgctgctggtcatcctgtggctgcaattgagttgggtgtggagccagaaggaccaggtgtttcagcctagcactgtcgcatcatcagagggggccgtcgtggaaatcttttgtaatcacagcgtgtccaacgcctacaatttcttttggtatctgcacttcccaggatgcgcacctaggctgctggtgaagggctctaagcccagccagcagggccggtacaacatgacctatgagcggttcagctcctctctgctgatcctgcaggtgcgggaggcagacgcagccgtgtactattgtgccgtggaggatctgaatcaggccggcacagccctgattttcggcaaaggaacaaccctgagcgtgagcagcgacatccagaaccctgagcccgccgtataccagctgaaggacccccgatctcaggatagtactctgtgcctgttcaccgactttgatagtcagatcaatgtgcctaaaaccatggaatccggaacttttattaccgacaagtgcgtgctggatatgaaagccatggacagtaagtcaaacggcgccatcgcttggagcaatcagacatccttcacttgccaggatatcttcaaggagaccaacgcaacatacccatcctctgacgtgccctgtgatgccaccctgacagagaagtctttcgaaacagacatgaacctgaattttcagaatctgagcgtgatgggcctgagaatcctgctgctgaaggtcgctgggtttaatctgctgatgacactgcggctgtggtcctcaggatctggtgctactaatttttctcttttgaagcaagctggagatgttgaagagaaccccggtccgatggctctgccagtgacagctctgctgcttcctctggctctgttgctgcatgccgccagacctattctgtggcacgagatgtggcatgaaggcctggaagaggcctccagactgtacttcggcgagagaaacgtgaagggcatgttcgaggtgctggaacccctgcatgccatgatggaaagaggccctcagacactgaaagagactagcttcaaccaggcctacggccgggatctgatggaagcccaagagtggtgccggaagtacatgaagtccggcaatgtgaaggacctcctgcaggcatgggacctgtactaccacgtgttccggcggatctctaagggcaaagacacaatcccttggctgggccatctgctcgttggactgtctggcgccttcggcttcatcatcctggtgtacctgctgatcaactgtcggaacacaggcccatggctgaagaaagtgctgaagtgcaacacccctgatccgagcaagttctttagccagctgtccagcgagcacggcggagatgttcagaagtggctgagcagcccatttcctagcagcagctttagccctggcggactggctcctgagatcagcccactggaagtgctggaaagggacaaagtgacccagctgctcctgcaacaggacaaggtgccagaacctgccagcctgtcttaaaagcttaattgagcggccgcgctttatttgtgaaatttgtgatgctattgctttatttgtaaccattataagctgcaataaacaagttaacaacaacaattgcattcattttatgtttcaggttcagggggagatgtgggaggttttttaaagctcaccgattttgattctcaaacaaatgtgtcacaaagtaaggattctgatgtgtatatcacagacaaaactgtgctagacatgaggtctatggacttcaagagcaacagtgctgtggcctggagcaacaaatctgactttgcatgtgcaaacgccttcaacaacagcattattccagaagacaccttcttccccagcccaggtaagggcagctttggtgccttcgcaggctgtttccttgcttcaggaatggccaggttctgcccagagctctggtcaatgatgtctaaaactcctctgattggtggtctcggcgcggccgctacgtagataagtagcatggcgggttaatcattaactacaaggaacccctagtgatggagttggccactccctctctgcgcgctcgctcgctcactgaggccgggcgaccaaaggtcgcccgacgcccgggctttgcccgggcggcctcagtgagcgagcgagcgcgccagctggcgtaatagcgaagaggcccgcaccgatcgcccttcccaacagttgcgcagcctgaatggcgaatggcgattccgttgcaatggctggcggtaatattgttctggatattaccagcaaggccgatagtttgagttcttctactcaggcaagtgatgttattactaatcaaagaagtattgcgacaacggttaatttgcgtgatggacagactcttttactcggtggcctcactgattataaaaacacttctcaggattctggcgtaccgttcctgtctaaaatccctttaatcggcctcctgtttagctcccgctctgattctaacgaggaaagcacgttatacgtgctcgtcaaagcaaccatagtacgcgccctgtagcggcgcattaagcgcggcgggtgtggtggttacgcgcagcgtgaccgctacacttgccagcgccctagcgcccgctcctttcgctttcttcccttcctttctcgccacgttcgccggctttccccgtcaagctctaaatcgggggctccctttagggttccgatttagtgctttacggcacctcgaccccaaaaaacttgattagggtgatggttcacgtagtgggccatcgccctgatagacggtttttcgccctttgacgttggagtccacgttctttaatagtggactcttgttccaaactggaacaacactcaaccctatctcggtctattcttttgatttataagggattttgccgatttcggcctattggttaaaaaatgagctgatttaacaaaaatttaacgcgaattttaacaaaatattaacgtttacaatttaaatatttgcttatacaatcttcctgtttttggggcttttctgattatcaaccggggtacatatgattgacatgctagttttacgattaccgttcatcgattctcttgtttgctccagactctcaggcaatgacctgatagcctttgtagagacctctcaaaaatagctaccctctccggcatgaatttatcagctagaacggttgaatatcatattgatggtgatttgactgtctccggcctttctcacccgtttgaatctttacctacacattactcaggcattgcatttaaaatatatgagggttctaaaaatttttatccttgcgttgaaataaaggcttctcccgcaaaagtattacagggtcataatgtttttggtacaaccgatttagctttatgctctgaggctttattgcttaattttgctaattctttgccttgcctgtatgatttattggatgttggaatcgcctgatgcggtattttctccttacgcatctgtgcggtatttcacaccgcatatggtgcactctcagtacaatctgctctgatgccgcatagttaagccagccccgacacccgccaacacccgctgacgcgccctgacgggcttgtctgctcccggcatccgcttacagacaagctgtgaccgtctccgggagctgcatgtgtcagaggttttcaccgtcatcaccgaaacgcgcgagacgaaagggcctcgtgatacgcctatttttataggttaatgtcatgataataatggtttcttagacgtcaggtggcacttttcggggaaatgtgcgcggaacccctatttgtttatttttctaaatacattcaaatatgtatccgctcatgagacaataaccctgataaatgcttcaataatattgaaaaaggaagagtatgagtattcaacatttccgtgtcgcccttattcccttttttgcggcattttgccttcctgtttttgctcacccagaaacgctggtgaaagtaaaagatgctgaagatcagttgggtgcacgagtgggttacatcgaactggatctcaacagcggtaagatccttgagagttttcgccccgaagaacgttttccaatgatgagcacttttaaagttctgctatgtggcgcggtattatcccgtattgacgccgggcaagagcaactcggtcgccgcatacactattctcagaatgacttggttgagtactcaccagtcacagaaaagcatcttacggatggcatgacagtaagagaattatgcagtgctgccataaccatgagtgataacactgcggccaacttacttctgacaacgatcggaggaccgaaggagctaaccgcttttttgcacaacatgggggatcatgtaactcgccttgatcgttgggaaccggagctgaatgaagccataccaaacgacgagcgtgacaccacgatgcctgtagcaatggcaacaacgttgcgcaaactattaactggcgaactacttactctagcttcccggcaacaattaatagactggatggaggcggataaagttgcaggaccacttctgcgctcggcccttccggctggctggtttattgctgataaatctggagccggtgagcgtgggtctcgcggtatcattgcagcactggggccagatggtaagccctcccgtatcgtagttatctacacgacggggagtcaggcaactatggatgaacgaaatagacagatcgctgagataggtgcctcactgattaagcattggtaactgtcagaccaagtttactcatatatactttagattgatttaaaacttcatttttaatttaaaaggatctaggtgaagatcctttttgataatctcatgaccaaaatcccttaacgtgagttttcgttccactgagcgtcagacccc

SEQ ID NO: 1444 - DNA, 7118 bp, Artificial Sequence
  Construct 3323
gtagaaaagatcaaaggatcttcttgagatcctttttttctgcgcgtaatctgctgcttgcaaacaaaaaaaccaccgctaccagcggtggtttgtttgccggatcaagagctaccaactctttttccgaaggtaactggcttcagcagagcgcagataccaaatactgtccttctagtgtagccgtagttaggccaccacttcaagaactctgtagcaccgcctacatacctcgctctgctaatcctgttaccagtggctgctgccagtggcgataagtcgtgtcttaccgggttggactcaagacgatagttaccggataaggcgcagcggtcgggctgaacggggggttcgtgcacacagcccagcttggagcgaacgacctacaccgaactgagatacctacagcgtgagctatgagaaagcgccacgcttcccgaagggagaaaggcggacaggtatccggtaagcggcagggtcggaacaggagagcgcacgagggagcttccagggggaaacgcctggtatctttatagtcctgtcgggtttcgccacctctgacttgagcgtcgatttttgtgatgctcgtcaggggggcggagcctatggaaaaacgccagcaacgcggcctttttacggttcctggccttttgctggccttttgctcacatgttctttcctgcgttatcccctgattctgtggataaccgtattaccgcctttgagtgagctgataccgctcgccgcagccgaacgaccgagcgcagcgagtcagtgagcgaggaagcggaagagcgcccaatacgcaaaccgcctctccccgcgcgttggccgattcattaatgcagctgcgcgctcgctcgctcactgaggccgcccgggcaaagcccgggcgtcgggcgacctttggtcgcccggcctcagtgagcgagcgagcgcgcagagagggagtggccaactccatcactaggggttccttgtagttaatgattaacccgccatgctacttatctacgtaccctattaaataaaagaataagcagtattattaagtagccctgcatttcaggtttccttgagtggcaggccaggcctggccgtgaacgttcactgaaatcatggcctcttggccaagattgatagcttgtgcctgtccctgagtcccagtccatcacgagcagctggtttctaagatgctatttcccgtataaagcatgagaccgtgacttgccagccccacagagccccgcccttgtccatcactggcatctggactccagcctgggttggggcaaagagggaaatgagatcatgtcctacgcgtaggaacagagaaacaggagaatatgggccaaacaggatatctgtggtaagcagttcctgccccggctcagggccaagaacagttggaacagcagaatatgggccaaacaggatatctgtggtaagcagttcctgccccggctcagggccaagaacagatggtccccagatgcggtcccgccctcagcagtttctagagaaccatcagatgtttccagggtgccccaaggacctgaaatgaccctgtgccttatttgaactaaccaatcagttcgcttctcgcttctgttcgcgcgcttctgctccccgagctctatataagcagagctcgtttagtgaaccgtcagatcgcctggagacgccatccacgctgttttgacttccatagaaggatcatggctctgccagtgacagctctgctgcttcctctggctctgttgctgcatgccgccagacctattctgtggcacgagatgtggcatgaaggcctggaagaggcctccagactgtacttcggcgagagaaacgtgaagggcatgttcgaggtgctggaacccctgcatgccatgatggaaagaggccctcagacactgaaagagacaagcttcaaccaggcctacggccgggatctgatggaagcccaagagtggtgccggaagtacatgaagtccggcaatgtgaaggacctcctgcaggcatgggacctgtactaccacgtgttccggcggatctctaagggcaaagacacaatcccttggctgggccatctgctcgttggactgtctggcgccttcggcttcatcatcctggtgtacctgctgatcaactgtcggaacacaggcccatggctgaagaaagtgctgaagtgcaacacccctgatccgagcaagttctttagccagctgtccagcgagcacggcggagatgttcagaagtggctgagcagcccatttcctagcagcagctttagccctggcggactggctcctgagatcagcccactggaagtgctggaaagggacaaagtgacccagctgctcctgcaacaggacaaggtgccagaacctgccagcctgtctctgaacaccgatgcctatctgtccctgcaagagctgcaaggatccggcgccaccaactttagtctgctcaagcaagccggggacgtcgaggaaaatcctgggccaatgggatcaagactgctgtgctgggtgctgctgtgcctgctgggagccggacctgtgaaagccggggtgactcagactccacgatacctgatcaagaccaggggccagcaggtgacactgtcttgcagcccaatctccggacaccgctccgtgtcttggtaccagcagacccctggacagggactgcagttcctgtttgagtatttctctgagacacagcggaacaagggcaatttccccggccggtttagcggcagacagtttagcaactccaggtctgagatgaatgtgagcaccctggagctgggcgactccgccctgtacctgtgcgcaagctccctggccctgggacaggggaatcagcagtttttcggacccggaacaaggctgaccgtgctggaggatctacgtaacgtgacaccacccaaagtctcactgtttgagcctagcaaggcagaaattgccaacaagcagaaggccaccctggtgtgcctggcaagagggttctttccagatcacgtggagctgtcctggtgggtcaacggcaaagaagtgcattctggggtctgcaccgacccccaggcttacaaggagagtaattactcatattgtctgtcaagccggctgagagtgtccgccacattctggcacaaccctaggaatcatttccgctgccaggtccagtttcacggcctgagtgaggaagataaatggccagaggggtcacctaagccagtgacacagaacatcagcgcagaagcctggggacgagcagactgtggcattactagcgcctcctatcatcagggcgtgctgagcgccactatcctgtacgagattctgctgggaaaggccaccctgtatgctgtgctggtctccggcctggtgctgatggccatggtcaagaaaaagaactctgggagtggagccacaaatttctctctgctgaaacaggctggagatgtggaggaaaaccccggccctatgaagagcctgcgcgtgctgctggtcatcctgtggctgcaattgagttgggtgtggagccagaaggaccaggtgtttcagcctagcactgtcgcatcatcagagggggccgtcgtggaaatcttttgtaatcacagcgtgtccaacgcctacaatttcttttggtatctgcacttcccaggatgcgcacctaggctgctggtgaagggctctaagcccagccagcagggccggtacaacatgacctatgagcggttcagctcctctctgctgatcctgcaggtgcgggaggcagacgcagccgtgtactattgtgccgtggaggatctgaatcaggccggcacagccctgattttcggcaaaggaacaaccctgagcgtgagcagcatccagaaccctgacccagccgtataccagctgagagactctaaatccagtgacaagtctgtctgcctattcaccgattttgattctcaaacaaatgtgtcacaaagtaaggattctgatgtgtatatcacagacaaaactgtgctagacatgaggtctatggacttcaagagcaacagtgctgtggcctggagcaacaaatctgactttgcatgtgcaaacgccttcaacaacagcattattccagaagacaccttcttccccagcccaggtaagggcagctttggtgccttcgcaggctgtttccttgcttcaggaatggatcctacgtagataagtagcatggcgggttaatcattaactacaaggaacccctagtgatggagttggccactccctctctgcgcgctcgctcgctcactgaggccgggcgaccaaaggtcgcccgacgcccgggctttgcccgggcggcctcagtgagcgagcgagcgcgccagctggcgtaatagcgaagaggcccgcaccgatcgcccttcccaacagttgcgcagcctgaatggcgaatggcgattccgttgcaatggctggcggtaatattgttctggatattaccagcaaggccgatagtttgagttcttctactcaggcaagtgatgttattactaatcaaagaagtattgcgacaacggttaatttgcgtgatggacagactcttttactcggtggcctcactgattataaaaacacttctcaggattctggcgtaccgttcctgtctaaaatccctttaatcggcctcctgtttagctcccgctctgattctaacgaggaaagcacgttatacgtgctcgtcaaagcaaccatagtacgcgccctgtagcggcgcattaagcgcggcgggtgtggtggttacgcgcagcgtgaccgctacacttgccagcgccctagcgcccgctcctttcgctttcttcccttcctttctcgccacgttcgccggctttccccgtcaagctctaaatcgggggctccctttagggttccgatttagtgctttacggcacctcgaccccaaaaaacttgattagggtgatggttcacgtagtgggccatcgccctgatagacggtttttcgccctttgacgttggagtccacgttctttaatagtggactcttgttccaaactggaacaacactcaaccctatctcggtctattcttttgatttataagggattttgccgatttcggcctattggttaaaaaatgagctgatttaacaaaaatttaacgcgaattttaacaaaatattaacgtttacaatttaaatatttgcttatacaatcttcctgtttttggggcttttctgattatcaaccggggtacatatgattgacatgctagttttacgattaccgttcatcgattctcttgtttgctccagactctcaggcaatgacctgatagcctttgtagagacctctcaaaaatagctaccctctccggcatgaatttatcagctagaacggttgaatatcatattgatggtgatttgactgtctccggcctttctcacccgtttgaatctttacctacacattactcaggcattgcatttaaaatatatgagggttctaaaaatttttatccttgcgttgaaataaaggcttctcccgcaaaagtattacagggtcataatgtttttggtacaaccgatttagctttatgctctgaggctttattgcttaattttgctaattctttgccttgcctgtatgatttattggatgttggaatcgcctgatgcggtattttctccttacgcatctgtgcggtatttcacaccgcatatggtgcactctcagtacaatctgctctgatgccgcatagttaagccagccccgacacccgccaacacccgctgacgcgccctgacgggcttgtctgctcccggcatccgcttacagacaagctgtgaccgtctccgggagctgcatgtgtcagaggttttcaccgtcatcaccgaaacgcgcgagacgaaagggcctcgtgatacgcctatttttataggttaatgtcatgataataatggtttcttagacgtcaggtggcacttttcggggaaatgtgcgcggaacccctatttgtttatttttctaaatacattcaaatatgtatccgctcatgagacaataaccctgataaatgcttcaataatattgaaaaaggaagagtatgagtattcaacatttccgtgtcgcccttattcccttttttgcggcattttgccttcctgtttttgctcacccagaaacgctggtgaaagtaaaagatgctgaagatcagttgggtgcacgagtgggttacatcgaactggatctcaacagcggtaagatccttgagagttttcgccccgaagaacgttttccaatgatgagcacttttaaagttctgctatgtggcgcggtattatcccgtattgacgccgggcaagagcaactcggtcgccgcatacactattctcagaatgacttggttgagtactcaccagtcacagaaaagcatcttacggatggcatgacagtaagagaattatgcagtgctgccataaccatgagtgataacactgcggccaacttacttctgacaacgatcggaggaccgaaggagctaaccgcttttttgcacaacatgggggatcatgtaactcgccttgatcgttgggaaccggagctgaatgaagccataccaaacgacgagcgtgacaccacgatgcctgtagcaatggcaacaacgttgcgcaaactattaactggcgaactacttactctagcttcccggcaacaattaatagactggatggaggcggataaagttgcaggaccacttctgcgctcggcccttccggctggctggtttattgctgataaatctggagccggtgagcgtgggtctcgcggtatcattgcagcactggggccagatggtaagccctcccgtatcgtagttatctacacgacggggagtcaggcaactatggatgaacgaaatagacagatcgctgagataggtgcctcactgattaagcattggtaactgtcagaccaagtttactcatatatactttagattgatttaaaacttcatttttaatttaaaaggatctaggtgaagatcctttttgataatctcatgaccaaaatcccttaacgtgagttttcgttccactgagcgtcagacccc

SEQ ID NO: 1445 - DNA, 9280 bp, Artificial Sequence
  Construct 3312
agcttaatgtagtcttatgcaatactcttgtagtcttgcaacatggtaacgatgagttagcaacatgccttacaaggagagaaaaagcaccgtgcatgccgattggtggaagtaaggtggtacgatcgtgccttattaggaaggcaacagacgggtctgacatggattggacgaaccactgaattgccgcattgcagagatattgtatttaagtgcctagctcgatacaataaacgggtctctctggttagaccagatctgagcctgggagctctctggctaactagggaacccactgcttaagcctcaataaagcttgccttgagtgcttcaagtagtgtgtgcccgtctgttgtgtgactctggtaactagagatccctcagacccttttagtcagtgtggaaaatctctagcagtggcgcccgaacagggacttgaaagcgaaagggaaaccagaggagctctctcgacgcaggactcggcttgctgaagcgcgcacggcaagaggcgaggggcggcgactggtgagtacgccaaaaattttgactagcggaggctagaaggagagagatgggtgcgagagcgtcagtattaagcgggggagaattagatcgcgatgggaaaaaattcggttaaggccagggggaaagaaaaaatataaattaaaacatatagtatgggcaagcagggagctagaacgattcgcagttaatcctggcctgttagaaacatcagaaggctgtagacaaatactgggacagctacaaccatcccttcagacaggatcagaagaacttagatcattatataatacagtagcaaccctctattgtgtgcatcaaaggatagagataaaagacaccaaggaagctttagacaagatagaggaagagcaaaacaaaagtaagaccaccgcacagcaagcggccgctgatcttcagacctggaggaggagatatgagggacaattggagaagtgaattatataaatataaagtagtaaaaattgaaccattaggagtagcacccaccaaggcaaagagaagagtggtgcagagagaaaaaagagcagtgggaataggagctttgttccttgggttcttgggagcagcaggaagcactatgggcgcagcctcaatgacgctgacggtacaggccagacaattattgtctggtatagtgcagcagcagaacaatttgctgagggctattgaggcgcaacagcatctgttgcaactcacagtctggggcatcaagcagctccaggcaagaatcctggctgtggaaagatacctaaaggatcaacagctcctggggatttggggttgctctggaaaactcatttgcaccactgctgtgccttggaatgctagttggagtaataaatctctggaacagatttggaatcacacgacctggatggagtgggacagagaaattaacaattacacaagcttaatacactccttaattgaagaatcgcaaaaccagcaagaaaagaatgaacaagaattattggaattagataaatgggcaagtttgtggaattggtttaacataacaaattggctgtggtatataaaattattcataatgatagtaggaggcttggtaggtttaagaatagtttttgctgtactttctatagtgaatagagttaggcagggatattcaccattatcgtttcagacccacctcccaaccccgaggggacccgacaggcccgaaggaatagaagaagaaggtggagagagagacagagacagatccattcgattagtgaacggatctcgacggtatcggttaacttttaaaagaaaaggggggattggggggtacagtgcaggggaaagaatagtagacataatagcaacagacatacaaactaaagaattacaaaaacaaattacaaaaattcaaaattttatcgatcacgagactagcctcgagaagcttgatatcgaattcccacggggttggacgcgtagaggctccggtgcccgtcagtgggcagagcgcacatcgcccacagtccccgagaagttggggggaggggtcggcaattgaaccggtgcctagagaaggtggcgcggggtaaactgggaaagtgatgtcgtgtactggctccgcctttttcccgagggtgggggagaaccgtatataagtgcagtagtcgccgtgaacgttctttttcgcaacgggtttgccgccagaacacagctagcaccggtgccgccaccatgcctctgggcctgctgtggctgggcctggccctgctgggcgccctgcacgcccaggccggcgtgcaggtggagacaatctccccaggcgacggacgcacattccctaagcggggccagacctgcgtggtgcactatacaggcatgctggaggatggcaagaagtttgacagctcccgggatagaaacaagccattcaagtttatgctgggcaagcaggaagtgatcagaggctgggaggagggcgtggcccagatgtctgtgggccagagggccaagctgaccatcagcccagactacgcctatggagcaacaggccacccaggaatcatcccacctcacgccaccctggtgttcgatgtggagctgctgaagctgggcgagggatccaacacatcaaaagagaacccctttctgttcgcattggaggccgtagtcatatctgttggatccatgggacttattatctccctgttgtgtgtgtacttctggctggaacggactatgcccaggatccccacgctcaagaatctggaagatctcgtcacagaataccatggtaatttcagcgcctggagcggagtctctaagggtctggccgaatccctccaacccgattattctgaacggttgtgcctcgtatccgaaataccaccaaaaggcggggctctgggtgagggcccaggggcgagtccgtgcaatcaacacagcccgtattgggcccctccttgttatacgttgaagcccgaaactggaagcggagctactaacttcagcctgctgaagcaggctggagacgtggaggagaaccctggacctatggcactgcccgtgaccgccctgctgctgcctctggccctgctgctgcacgcagcccggcctatcctgtggcacgagatgtggcacgagggcctggaggaggccagcaggctgtattttggcgagcgcaacgtgaagggcatgttcgaggtgctggagcctctgcacgccatgatggagagaggcccacagaccctgaaggagacatcctttaaccaggcctatggacgggacctgatggaggcacaggagtggtgcagaaagtacatgaagtctggcaatgtgaaggacctgctgcaggcctgggatctgtactatcacgtgtttcggagaatctccaagggcaaagacacgattccgtggcttgggcatctgctcgttgggctgagtggtgcgtttggtttcatcatcttggtctatctcttgatcaattgcagaaatacaggcccttggctgaaaaaagtgctcaagtgtaatacccccgacccaagcaagttcttctcccagctttcttcagagcatggaggcgatgtgcagaaatggctctcttcaccttttccctcctcaagcttctccccgggagggctggcgcccgagatttcacctcttgaggtacttgaacgagacaaggttacccaacttctccttcaacaggataaggtacccgaacctgcgagccttagctccaaccactctcttacgagctgcttcaccaatcagggatacttctttttccaccttcccgatgcgctggaaatcgaagcttgtcaagtttactttacctatgatccatatagcgaggaagatcccgacgaaggagtcgccggtgcgcccacgggttcctcaccccaacctctccagcctctctcaggagaagatgatgcttattgcacttttcccagtagagacgatctcctcctcttttctccatctcttttggggggaccttcccccccttctacggcacctggcgggtctggtgctggcgaggagcggatgccgccgtccctccaggagcgagtaccacgagattgggatccccagccacttggaccccccacccccggcgtacctgaccttgtcgattttcaacctccccctgaattggtgctgcgagaggctggggaggaagttccggacgctgggccgagggagggcgtgtcctttccatggagtaggcctccaggtcaaggcgagtttagggctctcaacgcgcggctgccgttgaatacagacgcttatctctcactgcaggaactgcaaggtcaggacccaacacatcttgtaggatctggtgctactaatttttctcttttgaagcaagctggagatgttgaagagaaccccggtccggtgagcaagggcgaggaggataacatggccatcatcaaggagttcatgcgcttcaaggtgcacatggagggctccgtgaacggccacgagttcgagatcgagggcgagggcgagggccgcccctacgagggcacccagaccgccaagctgaaggtgaccaagggtggccccctgcccttcgcctgggacatcctgtcccctcagttcatgtacggctccaaggcctacgtgaagcaccccgccgacatccccgactacttgaagctgtccttccccgagggcttcaagtgggagcgcgtgatgaacttcgaggacggcggcgtggtgaccgtgacccaggactcctctctgcaggacggcgagttcatctacaaggtgaagctgcgcggcaccaacttcccctccgacggccccgtaatgcagaagaagaccatgggctgggaggcctcctccgagcggatgtaccccgaggacggcgccctgaagggcgagatcaagcagaggctgaagctgaaggacggcggccactacgacgctgaggtcaagaccacctacaaggccaagaagcccgtgcagctgcccggcgcctacaacgtcaacatcaagttggacatcacctcccacaacgaggactacaccatcgtggaacagtacgaacgcgccgagggccgccactccaccggcggcatggacgagctgtacaagtgaactagtgtcgacaatcaacctctggattacaaaatttgtgaaagattgactggtattcttaactatgttgctccttttacgctatgtggatacgctgctttaatgcctttgtatcatgctattgcttcccgtatggctttcattttctcctccttgtataaatcctggttgctgtctctttatgaggagttgtggcccgttgtcaggcaacgtggcgtggtgtgcactgtgtttgctgacgcaacccccactggttggggcattgccaccacctgtcagctcctttccgggactttcgctttccccctccctattgccacggcggaactcatcgccgcctgccttgcccgctgctggacaggggctcggctgttgggcactgacaattccgtggtgttgtcggggaagctgacgtcctttccatggctgctcgcctgtgttgccacctggattctgcgcgggacgtccttctgctacgtcccttcggccctcaatccagcggaccttccttcccgcggcctgctgccggctctgcggcctcttccgcgtcttcgccttcgccctcagacgagtcggatctccctttgggccgcctccccgcctggaattcgagctcggtacctttaagaccaatgacttacaaggcagctgtagatcttagccactttttaaaagaaaaggggggactggaagggctaattcactcccaacgaagacaagatctgctttttgcttgtactgggtctctctggttagaccagatctgagcctgggagctctctggctaactagggaacccactgcttaagcctcaataaagcttgccttgagtgcttcaagtagtgtgtgcccgtctgttgtgtgactctggtaactagagatccctcagacccttttagtcagtgtggaaaatctctagcagtagtagttcatgtcatcttattattcagtatttataacttgcaaagaaatgaatatcagagagtgagaggaacttgtttattgcagcttataatggttacaaataaagcaatagcatcacaaatttcacaaataaagcatttttttcactgcattctagttgtggtttgtccaaactcatcaatgtatcttatcatgtctggctctagctatcccgcccctaactccgcccagttccgcccattctccgccccatggctgactaattttttttatttatgcagaggccgaggccgcctcggcctctgagctattccagaagtagtgaggaggcttttttggaggcctaggcttttgcgtcgagacgtacccaattcgccctatagtgagtcgtattacgcgcgctcactggccgtcgttttacaacgtcgtgactgggaaaaccctggcgttacccaacttaatcgccttgcagcacatccccctttcgccagctggcgtaatagcgaagaggcccgcaccgatcgcccttcccaacagttgcgcagcctgaatggcgaatggcgcgacgcgccctgtagcggcgcattaagcgcggcgggtgtggtggttacgcgcagcgtgaccgctacacttgccagcgccctagcgcccgctcctttcgctttcttcccttcctttctcgccacgttcgccggctttccccgtcaagctctaaatcgggggctccctttagggttccgatttagtgctttacggcacctcgaccccaaaaaacttgattagggtgatggttcacgtagtgggccatcgccctgatagacggtttttcgccctttgacgttggagtccacgttctttaatagtggactcttgttccaaactggaacaacactcaaccctatctcggtctattcttttgatttataagggattttgccgatttcggcctattggttaaaaaatgagctgatttaacaaaaatttaacgcgaattttaacaaaatattaacgtttacaatttcccaggtggcacttttcggggaaatgtgcgcggaacccctatttgtttatttttctaaatacattcaaatatgtatccgctcatgagacaataaccctgataaatgcttcaataatattgaaaaaggaagagtatgagtattcaacatttccgtgtcgcccttattcccttttttgcggcattttgccttcctgtttttgctcacccagaaacgctggtgaaagtaaaagatgctgaagatcagttgggtgcacgagtgggttacatcgaactggatctcaacagcggtaagatccttgagagttttcgccccgaagaacgttttccaatgatgagcacttttaaagttctgctatgtggcgcggtattatcccgtattgacgccgggcaagagcaactcggtcgccgcatacactattctcagaatgacttggttgagtactcaccagtcacagaaaagcatcttacggatggcatgacagtaagagaattatgcagtgctgccataaccatgagtgataacactgcggccaacttacttctgacaacgatcggaggaccgaaggagctaaccgcttttttgcacaacatgggggatcatgtaactcgccttgatcgttgggaaccggagctgaatgaagccataccaaacgacgagcgtgacaccacgatgcctgtagcaatggcaacaacgttgcgcaaactattaactggcgaactacttactctagcttcccggcaacaattaatagactggatggaggcggataaagttgcaggaccacttctgcgctcggcccttccggctggctggtttattgctgataaatctggagccggtgagcgtgggtctcgcggtatcattgcagcactggggccagatggtaagccctcccgtatcgtagttatctacacgacggggagtcaggcaactatggatgaacgaaatagacagatcgctgagataggtgcctcactgattaagcattggtaactgtcagaccaagtttactcatatatactttagattgatttaaaacttcatttttaatttaaaaggatctaggtgaagatcctttttgataatctcatgaccaaaatcccttaacgtgagttttcgttccactgagcgtcagaccccgtagaaaagatcaaaggatcttcttgagatcctttttttctgcgcgtaatctgctgcttgcaaacaaaaaaaccaccgctaccagcggtggtttgtttgccggatcaagagctaccaactctttttccgaaggtaactggcttcagcagagcgcagataccaaatactgtccttctagtgtagccgtagttaggccaccacttcaagaactctgtagcaccgcctacatacctcgctctgctaatcctgttaccagtggctgctgccagtggcgataagtcgtgtcttaccgggttggactcaagacgatagttaccggataaggcgcagcggtcgggctgaacggggggttcgtgcacacagcccagcttggagcgaacgacctacaccgaactgagatacctacagcgtgagctatgagaaagcgccacgcttcccgaagggagaaaggcggacaggtatccggtaagcggcagggtcggaacaggagagcgcacgagggagcttccagggggaaacgcctggtatctttatagtcctgtcgggtttcgccacctctgacttgagcgtcgatttttgtgatgctcgtcaggggggcggagcctatggaaaaacgccagcaacgcggcctttttacggttcctggccttttgctggccttttgctcacatgttctttcctgcgttatcccctgattctgtggataaccgtattaccgcctttgagtgagctgataccgctcgccgcagccgaacgaccgagcgcagcgagtcagtgagcgaggaagcggaagagcgcccaatacgcaaaccgcctctccccgcgcgttggccgattcattaatgcagctggcacgacaggtttcccgactggaaagcgggcagtgagcgcaacgcaattaatgtgagttagctcactcattaggcaccccaggctttacactttatgcttccggctcgtatgttgtgtggaattgtgagcggataacaatttcacacaggaaacagctatgaccatgattacgccaagcgcgcaattaaccctcactaaagggaacaaaagctggagctgca

SEQ ID NO: 1446 - DNA, 7682 bp, Artificial Sequence
  Construct 3354
gtagaaaagatcaaaggatcttcttgagatcctttttttctgcgcgtaatctgctgcttgcaaacaaaaaaaccaccgctaccagcggtggtttgtttgccggatcaagagctaccaactctttttccgaaggtaactggcttcagcagagcgcagataccaaatactgtccttctagtgtagccgtagttaggccaccacttcaagaactctgtagcaccgcctacatacctcgctctgctaatcctgttaccagtggctgctgccagtggcgataagtcgtgtcttaccgggttggactcaagacgatagttaccggataaggcgcagcggtcgggctgaacggggggttcgtgcacacagcccagcttggagcgaacgacctacaccgaactgagatacctacagcgtgagctatgagaaagcgccacgcttcccgaagggagaaaggcggacaggtatccggtaagcggcagggtcggaacaggagagcgcacgagggagcttccagggggaaacgcctggtatctttatagtcctgtcgggtttcgccacctctgacttgagcgtcgatttttgtgatgctcgtcaggggggcggagcctatggaaaaacgccagcaacgcggcctttttacggttcctggccttttgctggccttttgctcacatgttctttcctgcgttatcccctgattctgtggataaccgtattaccgcctttgagtgagctgataccgctcgccgcagccgaacgaccgagcgcagcgagtcagtgagcgaggaagcggaagagcgcccaatacgcaaaccgcctctccccgcgcgttggccgattcattaatgcagctgcgcgctcgctcgctcactgaggccgcccgggcaaagcccgggcgtcgggcgacctttggtcgcccggcctcagtgagcgagcgagcgcgcagagagggagtggccaactccatcactaggggttccttgtagttaatgattaacccgccatgctacttatctacgtaccctattaaataaaagaataagcagtattattaagtagccctgcatttcaggtttccttgagtggcaggccaggcctggccgtgaacgttcactgaaatcatggcctcttggccaagattgatagcttgtgcctgtccctgagtcccagtccatcacgagcagctggtttctaagatgctatttcccgtataaagcatgagaccgtgacttgccagccccacagagccccgcccttgtccatcactggcatctggactccagcctgggttggggcaaagagggaaatgagatcatgtcctacgcgtaggaacagagaaacaggagaatatgggccaaacaggatatctgtggtaagcagttcctgccccggctcagggccaagaacagttggaacagcagaatatgggccaaacaggatatctgtggtaagcagttcctgccccggctcagggccaagaacagatggtccccagatgcggtcccgccctcagcagtttctagagaaccatcagatgtttccagggtgccccaaggacctgaaatgaccctgtgccttatttgaactaaccaatcagttcgcttctcgcttctgttcgcgcgcttctgctccccgagctctatataagcagagctcgtttagtgaaccgtcagatcgcctggagacgccatccacgctgttttgacttccatagaaggatcatggctctgccagtgacagctctgctgcttcctctggctctgttgctgcatgccgccagacctattctgtggcacgagatgtggcatgaaggcctggaagaggcctccagactgtacttcggcgagagaaacgtgaagggcatgttcgaggtgctggaacccctgcatgccatgatggaaagaggccctcagacactgaaagagacaagcttcaaccaggcctacggccgggatctgatggaagcccaagagtggtgccggaagtacatgaagtccggcaatgtgaaggacctcctgcaggcatgggacctgtactaccacgtgttccggcggatctctaagggcaaagacacgattccgtggcttgggcatctgctcgttgggctgagtggtgcgtttggtttcatcatcttggtctatctcttgatcaattgcagaaatacaggcccttggctgaaaaaagtgctcaagtgtaatacccccgacccaagcaagttcttctcccagctttcttcagagcatggaggcgatgtgcagaaatggctctcttcaccttttccctcctcaagtttctccccgggagggctggcgcccgagatttcacctcttgaggtacttgaacgagacaaggttacccaacttctccttcaacaggataaagtacccgaacctgcgagccttagctccaaccactctcttacgagctgcttcaccaatcagggatacttctttttccaccttcccgatgcgctggaaatcgaagcatgtcaagtttactttacctatgatccatatagcgaggaagatcccgacgaaggagtcgccggtgcgcccacgggttcctcaccccaacctctccagcctctctcaggagaagatgatgcttattgcacttttcccagtagagacgatctcctcctcttttctccatctcttttggggggaccttcccccccttctacggcacctggcgggtctggtgctggcgaggagcggatgccgccgtccctccaggagcgagtaccacgagattgggatccccagccacttggaccccccacccccggcgtacctgaccttgtcgattttcaacctccccctgaattggtgctgcgagaggctggggaggaagttccggacgctgggccgagggagggcgtgtcctttccatggagtaggcctccaggtcaaggcgagtttagggctctcaacgcgcggctgccgttgaatacagacgcttatctctcactgcaggaactgcaaggtcaggacccaacacatcttgtaggatccggcgccaccaactttagtctgctcaagcaagccggggacgtcgaggaaaatcctgggccaatgggatcaagactgctgtgctgggtgctgctgtgcctgctgggagccggacctgtgaaagccggggtgactcagactccacgatacctgatcaagaccaggggccagcaggtgacactgtcttgcagcccaatctccggacaccgctccgtgtcttggtaccagcagacccctggacagggactgcagttcctgtttgagtatttctctgagacacagcggaacaagggcaatttccccggccggtttagcggcagacagtttagcaactccaggtctgagatgaatgtgagcaccctggagctgggcgactccgccctgtacctgtgcgcaagctccctggccctgggacaggggaatcagcagtttttcggacccggaacaaggctgaccgtgctggaggatctacgtaacgtgacaccacccaaagtctcactgtttgagcctagcaaggcagaaattgccaacaagcagaaggccaccctggtgtgcctggcaagagggttctttccagatcacgtggagctgtcctggtgggtcaacggcaaagaagtgcattctggggtctgcaccgacccccaggcttacaaggagagtaattactcatattgtctgtcaagccggctgagagtgtccgccacattctggcacaaccctaggaatcatttccgctgccaggtccagtttcacggcctgagtgaggaagataaatggccagaggggtcacctaagccagtgacacagaacatcagcgcagaagcctggggacgagcagactgtggcattactagcgcctcctatcatcagggcgtgctgagcgccactatcctgtacgagattctgctgggaaaggccaccctgtatgctgtgctggtctccggcctggtgctgatggccatggtcaagaaaaagaactctgggagtggagccacaaatttctctctgctgaaacaggctggagatgtggaggaaaaccccggccctatgaagagcctgcgcgtgctgctggtcatcctgtggctgcaattgagttgggtgtggagccagaaggaccaggtgtttcagcctagcactgtcgcatcatcagagggggccgtcgtggaaatcttttgtaatcacagcgtgtccaacgcctacaatttcttttggtatctgcacttcccaggatgcgcacctaggctgctggtgaagggctctaagcccagccagcagggccggtacaacatgacctatgagcggttcagctcctctctgctgatcctgcaggtgcgggaggcagacgcagccgtgtactattgtgccgtggaggatctgaatcaggccggcacagccctgattttcggcaaaggaacaaccctgagcgtgagcagcatccagaaccctgacccagccgtataccagctgagagactctaaatccagtgacaagtctgtctgcctattcaccgattttgattctcaaacaaatgtgtcacaaagtaaggattctgatgtgtatatcacagacaaaactgtgctagacatgaggtctatggacttcaagagcaacagtgctgtggcctggagcaacaaatctgactttgcatgtgcaaacgccttcaacaacagcattattccagaagacaccttcttccccagcccaggtaagggcagctttggtgccttcgcaggctgtttccttgcttcaggaatggatcctacgtagataagtagcatggcgggttaatcattaactacaaggaacccctagtgatggagttggccactccctctctgcgcgctcgctcgctcactgaggccgggcgaccaaaggtcgcccgacgcccgggctttgcccgggcggcctcagtgagcgagcgagcgcgccagctggcgtaatagcgaagaggcccgcaccgatcgcccttcccaacagttgcgcagcctgaatggcgaatggcgattccgttgcaatggctggcggtaatattgttctggatattaccagcaaggccgatagtttgagttcttctactcaggcaagtgatgttattactaatcaaagaagtattgcgacaacggttaatttgcgtgatggacagactcttttactcggtggcctcactgattataaaaacacttctcaggattctggcgtaccgttcctgtctaaaatccctttaatcggcctcctgtttagctcccgctctgattctaacgaggaaagcacgttatacgtgctcgtcaaagcaaccatagtacgcgccctgtagcggcgcattaagcgcggcgggtgtggtggttacgcgcagcgtgaccgctacacttgccagcgccctagcgcccgctcctttcgctttcttcccttcctttctcgccacgttcgccggctttccccgtcaagctctaaatcgggggctccctttagggttccgatttagtgctttacggcacctcgaccccaaaaaacttgattagggtgatggttcacgtagtgggccatcgccctgatagacggtttttcgccctttgacgttggagtccacgttctttaatagtggactcttgttccaaactggaacaacactcaaccctatctcggtctattcttttgatttataagggattttgccgatttcggcctattggttaaaaaatgagctgatttaacaaaaatttaacgcgaattttaacaaaatattaacgtttacaatttaaatatttgcttatacaatcttcctgtttttggggcttttctgattatcaaccggggtacatatgattgacatgctagttttacgattaccgttcatcgattctcttgtttgctccagactctcaggcaatgacctgatagcctttgtagagacctctcaaaaatagctaccctctccggcatgaatttatcagctagaacggttgaatatcatattgatggtgatttgactgtctccggcctttctcacccgtttgaatctttacctacacattactcaggcattgcatttaaaatatatgagggttctaaaaatttttatccttgcgttgaaataaaggcttctcccgcaaaagtattacagggtcataatgtttttggtacaaccgatttagctttatgctctgaggctttattgcttaattttgctaattctttgccttgcctgtatgatttattggatgttggaatcgcctgatgcggtattttctccttacgcatctgtgcggtatttcacaccgcatatggtgcactctcagtacaatctgctctgatgccgcatagttaagccagccccgacacccgccaacacccgctgacgcgccctgacgggcttgtctgctcccggcatccgcttacagacaagctgtgaccgtctccgggagctgcatgtgtcagaggttttcaccgtcatcaccgaaacgcgcgagacgaaagggcctcgtgatacgcctatttttataggttaatgtcatgataataatggtttcttagacgtcaggtggcacttttcggggaaatgtgcgcggaacccctatttgtttatttttctaaatacattcaaatatgtatccgctcatgagacaataaccctgataaatgcttcaataatattgaaaaaggaagagtatgagtattcaacatttccgtgtcgcccttattcccttttttgcggcattttgccttcctgtttttgctcacccagaaacgctggtgaaagtaaaagatgctgaagatcagttgggtgcacgagtgggttacatcgaactggatctcaacagcggtaagatccttgagagttttcgccccgaagaacgttttccaatgatgagcacttttaaagttctgctatgtggcgcggtattatcccgtattgacgccgggcaagagcaactcggtcgccgcatacactattctcagaatgacttggttgagtactcaccagtcacagaaaagcatcttacggatggcatgacagtaagagaattatgcagtgctgccataaccatgagtgataacactgcggccaacttacttctgacaacgatcggaggaccgaaggagctaaccgcttttttgcacaacatgggggatcatgtaactcgccttgatcgttgggaaccggagctgaatgaagccataccaaacgacgagcgtgacaccacgatgcctgtagcaatggcaacaacgttgcgcaaactattaactggcgaactacttactctagcttcccggcaacaattaatagactggatggaggcggataaagttgcaggaccacttctgcgctcggcccttccggctggctggtttattgctgataaatctggagccggtgagcgtgggtctcgcggtatcattgcagcactggggccagatggtaagccctcccgtatcgtagttatctacacgacggggagtcaggcaactatggatgaacgaaatagacagatcgctgagataggtgcctcactgattaagcattggtaactgtcagaccaagtttactcatatatactttagattgatttaaaacttcatttttaatttaaaaggatctaggtgaagatcctttttgataatctcatgaccaaaatcccttaacgtgagttttcgttccactgagcgtcagacccc

SEQ ID NO: 1447 - DNA, 7017 bp, Artificial Sequence
  Construct 3362
gtagaaaagatcaaaggatcttcttgagatcctttttttctgcgcgtaatctgctgcttgcaaacaaaaaaaccaccgctaccagcggtggtttgtttgccggatcaagagctaccaactctttttccgaaggtaactggcttcagcagagcgcagataccaaatactgtccttctagtgtagccgtagttaggccaccacttcaagaactctgtagcaccgcctacatacctcgctctgctaatcctgttaccagtggctgctgccagtggcgataagtcgtgtcttaccgggttggactcaagacgatagttaccggataaggcgcagcggtcgggctgaacggggggttcgtgcacacagcccagcttggagcgaacgacctacaccgaactgagatacctacagcgtgagctatgagaaagcgccacgcttcccgaagggagaaaggcggacaggtatccggtaagcggcagggtcggaacaggagagcgcacgagggagcttccagggggaaacgcctggtatctttatagtcctgtcgggtttcgccacctctgacttgagcgtcgatttttgtgatgctcgtcaggggggcggagcctatggaaaaacgccagcaacgcggcctttttacggttcctggccttttgctggccttttgctcacatgttctttcctgcgttatcccctgattctgtggataaccgtattaccgcctttgagtgagctgataccgctcgccgcagccgaacgaccgagcgcagcgagtcagtgagcgaggaagcggaagagcgcccaatacgcaaaccgcctctccccgcgcgttggccgattcattaatgcagctgcgcgctcgctcgctcactgaggccgcccgggcaaagcccgggcgtcgggcgacctttggtcgcccggcctcagtgagcgagcgagcgcgcagagagggagtggccaactccatcactaggggttccttgtagttaatgattaacccgccatgctacttatctacgtagcggccgcagcctgtgcagggtgcagggagggctagaggcctgaggcttgaaacagctctcaagtggagggggaaacaaccattgccctcatagaggacacatccacaccagggctgtgctagcgtgggcaggcaagccaggtgctggacctctgcacgtggggcatgtgtgggtatgtacatgtacctgtgttcttggtgtgtgtgtgtgtgtgtgtgtgtgtgtgtgtctagagctggggtgcaactatggggcccctcgggacatgtcccagccaatgcctgctttgaccagaggagtgtccacgtggctcaggtggtcgagtatctcataccgccctagcacacgtgtgactcctttcccctattgtctacgcagcctgcccttggacaaggacccgatgcccaaccccaggcctggcaagccctcggccccttccttggcccttggcccatccccacgcgtaggaacagagaaacaggagaatatgggccaaacaggatatctgtggtaagcagttcctgccccggctcagggccaagaacagttggaacagcagaatatgggccaaacaggatatctgtggtaagcagttcctgccccggctcagggccaagaacagatggtccccagatgcggtcccgccctcagcagtttctagagaaccatcagatgtttccagggtgccccaaggacctgaaatgaccctgtgccttatttgaactaaccaatcagttcgcttctcgcttctgttcgcgcgcttctgctccccgagctctatataagcagagctcgtttagtgaaccgtcagatcgcctggagacgccatccacgctgttttgacttccatagaaggatctcgaggccaccatgcctctgggcctgctgtggctgggcctggccctgctgggcgccctgcacgcccaggccgagatgtggcacgagggcctggaggaggccagcaggctgtattttggcgagcgcaacgtgaagggcatgttcgaggtgctggagcctctgcacgccatgatggagagaggcccacagaccctgaaggagacatcctttaaccaggcctatggacgggacctgatggaggcacaggagtggtgcagaaagtacatgaagtctggcaatgtgaaggacctgctgcaggcctgggatctgtactatcacgtgtttcggagaatctccaagggcaaagacacgattccgtggcttgggcatctgctcgttgggctgagtggtgcgtttggtttcatcatcttggtctatctcttgatcaattgcagaaatacaggcccttggctgaaaaaagtgctcaagtgtaatacccccgacccaagcaagttcttctcccagctttcttcagagcatggaggcgatgtgcagaaatggctctcttcaccttttccctcctcaagtttctccccgggagggctggcgcccgagatttcacctcttgaggtacttgaacgagacaaggttacccaacttctccttcaacaggataaggtacccgaacctgcgagccttagctccaaccactctcttacgagctgcttcaccaatcagggatacttctttttccaccttcccgatgcgctggaaatcgaagcatgtcaagtttactttacctatgatccatatagcgaggaagatcccgacgaaggagtcgccggtgcgcccacgggttcctcaccccaacctctccagcctctctcaggagaagatgatgcttattgcacttttcccagtagagacgatctcctcctcttttctccatctcttttggggggaccttcccccccttctacggcacctggcgggtctggtgctggcgaggagcggatgccgccgtccctccaggagcgagtaccacgagattgggatccccagccacttggaccaccaactccaggcgtacctgaccttgtcgattttcaacctccccctgaattggtgctgcgagaggctggggaggaagttccggacgctgggccgagggagggcgtgtcctttccatggagtaggcctccaggtcaaggcgagtttagggctctcaacgcgcggctgccgttgaatacagacgcttatctctcactgcaggaactgcaaggtcaggacccaacacatcttgtaggatccggcgccaccaactttagtctgctcaagcaagccggggacgtcgaggaaaatcctgggccagaaatgtggcacgaaggactcgaggaagccagtcggctgtattttggcgagcggaatgtgaaagggatgtttgaagtgctcgagcctctccacgctatgatggaacggggaccccagactctcaaagaaaccagctttaatcaggcttacggacgcgacctcatggaagctcaagaatggtgtagaaagtatatgaagagtggcaacgtgaaagatctgctgcaagcctgggatctctattatcacgtgttcagacgcatcagcaaaggcagcggcgccacaaatttctccctgctgaaacaggccggcgacgtggaagagaatcccggaccttatccatacgatgtcccagattatgcgcccaatcctagacctggcaagcccagcgctccttctcttgctcttggaccttctcctggtgcctcgcccagctggagggctgcacccaaagcctcagacctgctgggggcccggggcccagggggaaccttccagggccgagatcttcgaggcggggcccatgcctcctcttcttccttgaaccccatgccaccatcgcagctgcaggtgaggccctgggcccaggatggggcaggcagggtggggtacctggacctacaggtgccgacctttactgtggcactgggcgggaggggggctggctggggcacaggaagtggtttctgggtcccaggcaagtctgtgacttatgcagatgttgcagggccaagaaaatccccacctgccaggcctcagagattggaggctctccccgacctcccaatccctgtctcaggagaggaggaggccgtattgtagtcccatgagcatagctatgtgtccccatccccatgtgacaagagaagaggaggatcctacgtagataagtagcatggcgggttaatcattaactacaaggaacccctagtgatggagttggccactccctctctgcgcgctcgctcgctcactgaggccgggcgaccaaaggtcgcccgacgcccgggctttgcccgggcggcctcagtgagcgagcgagcgcgccagctggcgtaatagcgaagaggcccgcaccgatcgcccttcccaacagttgcgcagcctgaatggcgaatggcgattccgttgcaatggctggcggtaatattgttctggatattaccagcaaggccgatagtttgagttcttctactcaggcaagtgatgttattactaatcaaagaagtattgcgacaacggttaatttgcgtgatggacagactcttttactcggtggcctcactgattataaaaacacttctcaggattctggcgtaccgttcctgtctaaaatccctttaatcggcctcctgtttagctcccgctctgattctaacgaggaaagcacgttatacgtgctcgtcaaagcaaccatagtacgcgccctgtagcggcgcattaagcgcggcgggtgtggtggttacgcgcagcgtgaccgctacacttgccagcgccctagcgcccgctcctttcgctttcttcccttcctttctcgccacgttcgccggctttccccgtcaagctctaaatcgggggctccctttagggttccgatttagtgctttacggcacctcgaccccaaaaaacttgattagggtgatggttcacgtagtgggccatcgccctgatagacggtttttcgccctttgacgttggagtccacgttctttaatagtggactcttgttccaaactggaacaacactcaaccctatctcggtctattcttttgatttataagggattttgccgatttcggcctattggttaaaaaatgagctgatttaacaaaaatttaacgcgaattttaacaaaatattaacgtttacaatttaaatatttgcttatacaatcttcctgtttttggggcttttctgattatcaaccggggtacatatgattgacatgctagttttacgattaccgttcatcgattctcttgtttgctccagactctcaggcaatgacctgatagcctttgtagagacctctcaaaaatagctaccctctccggcatgaatttatcagctagaacggttgaatatcatattgatggtgatttgactgtctccggcctttctcacccgtttgaatctttacctacacattactcaggcattgcatttaaaatatatgagggttctaaaaatttttatccttgcgttgaaataaaggcttctcccgcaaaagtattacagggtcataatgtttttggtacaaccgatttagctttatgctctgaggctttattgcttaattttgctaattctttgccttgcctgtatgatttattggatgttggaatcgcctgatgcggtattttctccttacgcatctgtgcggtatttcacaccgcatatggtgcactctcagtacaatctgctctgatgccgcatagttaagccagccccgacacccgccaacacccgctgacgcgccctgacgggcttgtctgctcccggcatccgcttacagacaagctgtgaccgtctccgggagctgcatgtgtcagaggttttcaccgtcatcaccgaaacgcgcgagacgaaagggcctcgtgatacgcctatttttataggttaatgtcatgataataatggtttcttagacgtcaggtggcacttttcggggaaatgtgcgcggaacccctatttgtttatttttctaaatacattcaaatatgtatccgctcatgagacaataaccctgataaatgcttcaataatattgaaaaaggaagagtatgagtattcaacatttccgtgtcgcccttattcccttttttgcggcattttgccttcctgtttttgctcacccagaaacgctggtgaaagtaaaagatgctgaagatcagttgggtgcacgagtgggttacatcgaactggatctcaacagcggtaagatccttgagagttttcgccccgaagaacgttttccaatgatgagcacttttaaagttctgctatgtggcgcggtattatcccgtattgacgccgggcaagagcaactcggtcgccgcatacactattctcagaatgacttggttgagtactcaccagtcacagaaaagcatcttacggatggcatgacagtaagagaattatgcagtgctgccataaccatgagtgataacactgcggccaacttacttctgacaacgatcggaggaccgaaggagctaaccgcttttttgcacaacatgggggatcatgtaactcgccttgatcgttgggaaccggagctgaatgaagccataccaaacgacgagcgtgacaccacgatgcctgtagcaatggcaacaacgttgcgcaaactattaactggcgaactacttactctagcttcccggcaacaattaatagactggatggaggcggataaagttgcaggaccacttctgcgctcggcccttccggctggctggtttattgctgataaatctggagccggtgagcgtgggtctcgcggtatcattgcagcactggggccagatggtaagccctcccgtatcgtagttatctacacgacggggagtcaggcaactatggatgaacgaaatagacagatcgctgagataggtgcctcactgattaagcattggtaactgtcagaccaagtttactcatatatactttagattgatttaaaacttcatttttaatttaaaaggatctaggtgaagatcctttttgataatctcatgaccaaaatcccttaacgtgagttttcgttccactgagcgtcagacccc

SEQ ID NO: 1448 - DNA, 7148 bp, Artificial Sequence
  Construct 3363
gtagaaaagatcaaaggatcttcttgagatcctttttttctgcgcgtaatctgctgcttgcaaacaaaaaaaccaccgctaccagcggtggtttgtttgccggatcaagagctaccaactctttttccgaaggtaactggcttcagcagagcgcagataccaaatactgtccttctagtgtagccgtagttaggccaccacttcaagaactctgtagcaccgcctacatacctcgctctgctaatcctgttaccagtggctgctgccagtggcgataagtcgtgtcttaccgggttggactcaagacgatagttaccggataaggcgcagcggtcgggctgaacggggggttcgtgcacacagcccagcttggagcgaacgacctacaccgaactgagatacctacagcgtgagctatgagaaagcgccacgcttcccgaagggagaaaggcggacaggtatccggtaagcggcagggtcggaacaggagagcgcacgagggagcttccagggggaaacgcctggtatctttatagtcctgtcgggtttcgccacctctgacttgagcgtcgatttttgtgatgctcgtcaggggggcggagcctatggaaaaacgccagcaacgcggcctttttacggttcctggccttttgctggccttttgctcacatgttctttcctgcgttatcccctgattctgtggataaccgtattaccgcctttgagtgagctgataccgctcgccgcagccgaacgaccgagcgcagcgagtcagtgagcgaggaagcggaagagcgcccaatacgcaaaccgcctctccccgcgcgttggccgattcattaatgcagctgcgcgctcgctcgctcactgaggccgcccgggcaaagcccgggcgtcgggcgacctttggtcgcccggcctcagtgagcgagcgagcgcgcagagagggagtggccaactccatcactaggggttccttgtagttaatgattaacccgccatgctacttatctacgtaccctattaaataaaagaataagcagtattattaagtagccctgcatttcaggtttccttgagtggcaggccaggcctggccgtgaacgttcactgaaatcatggcctcttggccaagattgatagcttgtgcctgtccctgagtcccagtccatcacgagcagctggtttctaagatgctatttcccgtataaagcatgagaccgtgacttgccagccccacagagccccgcccttgtccatcactggcatctggactccagcctgggttggggcaaagagggaaatgagatcatgtcctacgcgtaggaacagagaaacaggagaatatgggccaaacaggatatctgtggtaagcagttcctgccccggctcagggccaagaacagttggaacagcagaatatgggccaaacaggatatctgtggtaagcagttcctgccccggctcagggccaagaacagatggtccccagatgcggtcccgccctcagcagtttctagagaaccatcagatgtttccagggtgccccaaggacctgaaatgaccctgtgccttatttgaactaaccaatcagttcgcttctcgcttctgttcgcgcgcttctgctccccgagctctatataagcagagctcgtttagtgaaccgtcagatcgcctggagacgccatccacgctgttttgacttccatagaaggatcatgcctctgggcctgctgtggctgggcctggccctgctgggcgccctgcacgcccaggccggcgtgcaggtggagacaatctccccaggcgacggacgcacattccctaagcggggccagacctgcgtggtgcactatacaggcatgctggaggatggcaagaagtttgacagctcccgggatagaaacaagccattcaagtttatgctgggcaagcaggaagtgatcagaggctgggaggagggcgtggcccagatgtctgtgggccagagggccaagctgaccatcagcccagactacgcctatggagcaacaggccacccaggaatcatcccacctcacgccaccctggtgttcgatgtggagctgctgaagctgggcgagggatccaacacatcaaaagagaacccctttctgttcgcattggaggccgtagtcatatctgttggatccatgggacttattatctccctgttgtgtgtgtacttctggctggaacggactatgcccaggatccccacgctcaagaatctggaagatctcgtcacagaataccatggtaatttcagcgcctggagcggagtctctaagggtctggccgaatccctccaacccgattattctgaacggttgtgcctcgtatccgaaataccaccaaaaggcggggctctgggtgagggcccaggggcgagtccgtgcaatcaacacagcccgtattgggcccctccttgttatacgttgaagcccgaaactggatccggcgccaccaactttagtctgctcaagcaagccggggacgtcgaggaaaatcctgggccaatgggatcaagactgctgtgctgggtgctgctgtgcctgctgggagccggacctgtgaaagccggggtgactcagactccacgatacctgatcaagaccaggggccagcaggtgacactgtcttgcagcccaatctccggacaccgctccgtgtcttggtaccagcagacccctggacagggactgcagttcctgtttgagtatttctctgagacacagcggaacaagggcaatttccccggccggtttagcggcagacagtttagcaactccaggtctgagatgaatgtgagcaccctggagctgggcgactccgccctgtacctgtgcgcaagctccctggccctgggacaggggaatcagcagtttttcggacccggaacaaggctgaccgtgctggaggatctacgtaacgtgacaccacccaaagtctcactgtttgagcctagcaaggcagaaattgccaacaagcagaaggccaccctggtgtgcctggcaagagggttctttccagatcacgtggagctgtcctggtgggtcaacggcaaagaagtgcattctggggtctgcaccgacccccaggcttacaaggagagtaattactcatattgtctgtcaagccggctgagagtgtccgccacattctggcacaaccctaggaatcatttccgctgccaggtccagtttcacggcctgagtgaggaagataaatggccagaggggtcacctaagccagtgacacagaacatcagcgcagaagcctggggacgagcagactgtggcattactagcgcctcctatcatcagggcgtgctgagcgccactatcctgtacgagattctgctgggaaaggccaccctgtatgctgtgctggtctccggcctggtgctgatggccatggtcaagaaaaagaactctgggagtggagccacaaatttctctctgctgaaacaggctggagatgtggaggaaaaccccggccctatgaagagcctgcgcgtgctgctggtcatcctgtggctgcaattgagttgggtgtggagccagaaggaccaggtgtttcagcctagcactgtcgcatcatcagagggggccgtcgtggaaatcttttgtaatcacagcgtgtccaacgcctacaatttcttttggtatctgcacttcccaggatgcgcacctaggctgctggtgaagggctctaagcccagccagcagggccggtacaacatgacctatgagcggttcagctcctctctgctgatcctgcaggtgcgggaggcagacgcagccgtgtactattgtgccgtggaggatctgaatcaggccggcacagccctgattttcggcaaaggaacaaccctgagcgtgagcagcatccagaaccctgacccagccgtataccagctgagagactctaaatccagtgacaagtctgtctgcctattcaccgattttgattctcaaacaaatgtgtcacaaagtaaggattctgatgtgtatatcacagacaaaactgtgctagacatgaggtctatggacttcaagagcaacagtgctgtggcctggagcaacaaatctgactttgcatgtgcaaacgccttcaacaacagcattattccagaagacaccttcttccccagcccaggtaagggcagctttggtgccttcgcaggctgtttccttgcttcaggaatggatcctacgtagataagtagcatggcgggttaatcattaactacaaggaacccctagtgatggagttggccactccctctctgcgcgctcgctcgctcactgaggccgggcgaccaaaggtcgcccgacgcccgggctttgcccgggcggcctcagtgagcgagcgagcgcgccagctggcgtaatagcgaagaggcccgcaccgatcgcccttcccaacagttgcgcagcctgaatggcgaatggcgattccgttgcaatggctggcggtaatattgttctggatattaccagcaaggccgatagtttgagttcttctactcaggcaagtgatgttattactaatcaaagaagtattgcgacaacggttaatttgcgtgatggacagactcttttactcggtggcctcactgattataaaaacacttctcaggattctggcgtaccgttcctgtctaaaatccctttaatcggcctcctgtttagctcccgctctgattctaacgaggaaagcacgttatacgtgctcgtcaaagcaaccatagtacgcgccctgtagcggcgcattaagcgcggcgggtgtggtggttacgcgcagcgtgaccgctacacttgccagcgccctagcgcccgctcctttcgctttcttcccttcctttctcgccacgttcgccggctttccccgtcaagctctaaatcgggggctccctttagggttccgatttagtgctttacggcacctcgaccccaaaaaacttgattagggtgatggttcacgtagtgggccatcgccctgatagacggtttttcgccctttgacgttggagtccacgttctttaatagtggactcttgttccaaactggaacaacactcaaccctatctcggtctattcttttgatttataagggattttgccgatttcggcctattggttaaaaaatgagctgatttaacaaaaatttaacgcgaattttaacaaaatattaacgtttacaatttaaatatttgcttatacaatcttcctgtttttggggcttttctgattatcaaccggggtacatatgattgacatgctagttttacgattaccgttcatcgattctcttgtttgctccagactctcaggcaatgacctgatagcctttgtagagacctctcaaaaatagctaccctctccggcatgaatttatcagctagaacggttgaatatcatattgatggtgatttgactgtctccggcctttctcacccgtttgaatctttacctacacattactcaggcattgcatttaaaatatatgagggttctaaaaatttttatccttgcgttgaaataaaggcttctcccgcaaaagtattacagggtcataatgtttttggtacaaccgatttagctttatgctctgaggctttattgcttaattttgctaattctttgccttgcctgtatgatttattggatgttggaatcgcctgatgcggtattttctccttacgcatctgtgcggtatttcacaccgcatatggtgcactctcagtacaatctgctctgatgccgcatagttaagccagccccgacacccgccaacacccgctgacgcgccctgacgggcttgtctgctcccggcatccgcttacagacaagctgtgaccgtctccgggagctgcatgtgtcagaggttttcaccgtcatcaccgaaacgcgcgagacgaaagggcctcgtgatacgcctatttttataggttaatgtcatgataataatggtttcttagacgtcaggtggcacttttcggggaaatgtgcgcggaacccctatttgtttatttttctaaatacattcaaatatgtatccgctcatgagacaataaccctgataaatgcttcaataatattgaaaaaggaagagtatgagtattcaacatttccgtgtcgcccttattcccttttttgcggcattttgccttcctgtttttgctcacccagaaacgctggtgaaagtaaaagatgctgaagatcagttgggtgcacgagtgggttacatcgaactggatctcaacagcggtaagatccttgagagttttcgccccgaagaacgttttccaatgatgagcacttttaaagttctgctatgtggcgcggtattatcccgtattgacgccgggcaagagcaactcggtcgccgcatacactattctcagaatgacttggttgagtactcaccagtcacagaaaagcatcttacggatggcatgacagtaagagaattatgcagtgctgccataaccatgagtgataacactgcggccaacttacttctgacaacgatcggaggaccgaaggagctaaccgcttttttgcacaacatgggggatcatgtaactcgccttgatcgttgggaaccggagctgaatgaagccataccaaacgacgagcgtgacaccacgatgcctgtagcaatggcaacaacgttgcgcaaactattaactggcgaactacttactctagcttcccggcaacaattaatagactggatggaggcggataaagttgcaggaccacttctgcgctcggcccttccggctggctggtttattgctgataaatctggagccggtgagcgtgggtctcgcggtatcattgcagcactggggccagatggtaagccctcccgtatcgtagttatctacacgacggggagtcaggcaactatggatgaacgaaatagacagatcgctgagataggtgcctcactgattaagcattggtaactgtcagaccaagtttactcatatatactttagattgatttaaaacttcatttttaatttaaaaggatctaggtgaagatcctttttgataatctcatgaccaaaatcccttaacgtgagttttcgttccactgagcgtcagacccc

SEQ ID NO: 1449 - DNA, 7732 bp, Artificial Sequence
  Construct 3364
gtagaaaagatcaaaggatcttcttgagatcctttttttctgcgcgtaatctgctgcttgcaaacaaaaaaaccaccgctaccagcggtggtttgtttgccggatcaagagctaccaactctttttccgaaggtaactggcttcagcagagcgcagataccaaatactgtccttctagtgtagccgtagttaggccaccacttcaagaactctgtagcaccgcctacatacctcgctctgctaatcctgttaccagtggctgctgccagtggcgataagtcgtgtcttaccgggttggactcaagacgatagttaccggataaggcgcagcggtcgggctgaacggggggttcgtgcacacagcccagcttggagcgaacgacctacaccgaactgagatacctacagcgtgagctatgagaaagcgccacgcttcccgaagggagaaaggcggacaggtatccggtaagcggcagggtcggaacaggagagcgcacgagggagcttccagggggaaacgcctggtatctttatagtcctgtcgggtttcgccacctctgacttgagcgtcgatttttgtgatgctcgtcaggggggcggagcctatggaaaaacgccagcaacgcggcctttttacggttcctggccttttgctggccttttgctcacatgttctttcctgcgttatcccctgattctgtggataaccgtattaccgcctttgagtgagctgataccgctcgccgcagccgaacgaccgagcgcagcgagtcagtgagcgaggaagcggaagagcgcccaatacgcaaaccgcctctccccgcgcgttggccgattcattaatgcagctgcgcgctcgctcgctcactgaggccgcccgggcaaagcccgggcgtcgggcgacctttggtcgcccggcctcagtgagcgagcgagcgcgcagagagggagtggccaactccatcactaggggttccttgtagttaatgattaacccgccatgctacttatctacgtagcggccgcactgaaatcatggcctcttggccaagattgatagcttgtgcctgtccctgagtcccagtccatcacgagcagctggtttctaagatgctatttcccgtataaagcatgagaccgtgacttgccagccccacagagccccgcccttgtccatcactggcatctggactccagcctgggttggggcaaagagggaaatgagatcatgtcctaaccctgatcctcttgtcccacagatatccagaaccctgaccctgccgtgtaccagctgagagactctaaatccagtgacaagtctgtctgcctatattaaggaacagagaaacaggagaatatgggccaaacaggatatctgtggtaagcagttcctgccccggctcagggccaagaacagttggaacagcagaatatgggccaaacaggatatctgtggtaagcagttcctgccccggctcagggccaagaacagatggtccccagatgcggtcccgccctcagcagtttctagagaaccatcagatgtttccagggtgccccaaggacctgaaatgaccctgtgccttatttgaactaaccaatcagttcgcttctcgcttctgttcgcgcgcttctgctccccgagctctatataagcagagctcgtttagtgaaccgtcagatcgcctggagacgccatccacgctgttttgacttccatagaaggatcgactcgagtaatgcctctgggcctgctgtggctgggcctggccctgctgggcgccctgcacgcccaggccggcgtgcaggtggagacaatctccccaggcgacggacgcacattccctaagcggggccagacctgcgtggtgcactatacaggcatgctggaggatggcaagaagtttgacagctcccgggatagaaacaagccattcaagtttatgctgggcaagcaggaagtgatcagaggctgggaggagggcgtggcccagatgtctgtgggccagagggccaagctgaccatcagcccagactacgcctatggagcaacaggccacccaggaatcatcccacctcacgccaccctggtgttcgatgtggagctgctgaagctgggcgagggatccaacacatcaaaagagaacccctttctgttcgcattggaggccgtagtcatatctgttggatccatgggacttattatctccctgttgtgtgtgtacttctggctggaacggactatgcccaggatccccacgctcaagaatctggaagatctcgtcacagaataccatggtaatttcagcgcctggagcggagtctctaagggtctggccgaatccctccaacccgattattctgaacggttgtgcctcgtatccgaaataccaccaaaaggcggggctctgggtgagggcccaggggcgagtccgtgcaatcaacacagcccgtattgggcccctccttgttatacgttgaagcccgaaactggctccggcgccaccaactttagtctgctcaagcaagccggggacgtcgaggaaaatcctgggccaatgggatcaagactgctgtgctgggtgctgctgtgcctgctgggagccggacctgtgaaagccggggtgactcagactccacgatacctgatcaagaccaggggccagcaggtgacactgtcttgcagcccaatctccggacaccgctccgtgtcttggtaccagcagacccctggacagggactgcagttcctgtttgagtatttctctgagacacagcggaacaagggcaatttccccggccggtttagcggcagacagtttagcaactccaggtctgagatgaatgtgagcaccctggagctgggcgactccgccctgtacctgtgcgcaagctccctggccctgggacaggggaatcagcagtttttcggacccggaacaaggctgaccgtgctggaggatctacgtaacgtgacaccacccaaagtctcactgtttgagcctagcaaggcagaaattgccaacaagcagaaggccaccctggtgtgcctggcaagagggttctttccagatcacgtggagctgtcctggtgggtcaacggcaaagaagtgcattctggggtctgcaccgacccccaggcttacaaggagagtaattactcatattgtctgtcaagccggctgagagtgtccgccacattctggcacaaccctaggaatcatttccgctgccaggtccagtttcacggcctgagtgaggaagataaatggccagaggggtcacctaagccagtgacacagaacatcagcgcagaagcctggggacgagcagactgtggcattactagcgcctcctatcatcagggcgtgctgagcgccactatcctgtacgagattctgctgggaaaggccaccctgtatgctgtgctggtctccggcctggtgctgatggccatggtcaagaaaaagaactctgggagtggagccacaaatttctctctgctgaaacaggctggagatgtggaggaaaaccccggccctatgaagagcctgcgcgtgctgctggtcatcctgtggctgcaattgagttgggtgtggagccagaaggaccaggtgtttcagcctagcactgtcgcatcatcagagggggccgtcgtggaaatcttttgtaatcacagcgtgtccaacgcctacaatttcttttggtatctgcacttcccaggatgcgcacctaggctgctggtgaagggctctaagcccagccagcagggccggtacaacatgacctatgagcggttcagctcctctctgctgatcctgcaggtgcgggaggcagacgcagccgtgtactattgtgccgtggaggatctgaatcaggccggcacagccctgattttcggcaaaggaacaaccctgagcgtgagcagcgacatccagaaccctgagcccgccgtataccagctgaaggacccccgatctcaggatagtactctgtgcctgttcaccgactttgatagtcagatcaatgtgcctaaaaccatggaatccggaacttttattaccgacaagtgcgtgctggatatgaaagccatggacagtaagtcaaacggcgccatcgcttggagcaatcagacatccttcacttgccaggatatcttcaaggagaccaacgcaacatacccatcctctgacgtgccctgtgatgccaccctgacagagaagtctttcgaaacagacatgaacctgaattttcagaatctgagcgtgatgggcctgagaatcctgctgctgaaggtcgctgggtttaatctgctgatgacactgcggctgtggtcctcataaagcttaattgagcggccgcgctttatttgtgaaatttgtgatgctattgctttatttgtaaccattataagctgcaataaacaagttaacaacaacaattgcattcattttatgtttcaggttcagggggagatgtgggaggttttttaaagctcaccgattttgattctcaaacaaatgtgtcacaaagtaaggattctgatgtgtatatcacagacaaaactgtgctagacatgaggtctatggacttcaagagcaacagtgctgtggcctggagcaacaaatctgactttgcatgtgcaaacgccttcaacaacagcattattccagaagacaccttcttccccagcccaggtaagggcagctttggtgccttcgcaggctgtttccttgcttcaggaatggccaggttctgcccagagctctggtcaatgatgtctaaaactcctctgattggtggtctcggcgcggccgctacgtagataagtagcatggcgggttaatcattaactacaaggaacccctagtgatggagttggccactccctctctgcgcgctcgctcgctcactgaggccgggcgaccaaaggtcgcccgacgcccgggctttgcccgggcggcctcagtgagcgagcgagcgcgccagctggcgtaatagcgaagaggcccgcaccgatcgcccttcccaacagttgcgcagcctgaatggcgaatggcgattccgttgcaatggctggcggtaatattgttctggatattaccagcaaggccgatagtttgagttcttctactcaggcaagtgatgttattactaatcaaagaagtattgcgacaacggttaatttgcgtgatggacagactcttttactcggtggcctcactgattataaaaacacttctcaggattctggcgtaccgttcctgtctaaaatccctttaatcggcctcctgtttagctcccgctctgattctaacgaggaaagcacgttatacgtgctcgtcaaagcaaccatagtacgcgccctgtagcggcgcattaagcgcggcgggtgtggtggttacgcgcagcgtgaccgctacacttgccagcgccctagcgcccgctcctttcgctttcttcccttcctttctcgccacgttcgccggctttccccgtcaagctctaaatcgggggctccctttagggttccgatttagtgctttacggcacctcgaccccaaaaaacttgattagggtgatggttcacgtagtgggccatcgccctgatagacggtttttcgccctttgacgttggagtccacgttctttaatagtggactcttgttccaaactggaacaacactcaaccctatctcggtctattcttttgatttataagggattttgccgatttcggcctattggttaaaaaatgagctgatttaacaaaaatttaacgcgaattttaacaaaatattaacgtttacaatttaaatatttgcttatacaatcttcctgtttttggggcttttctgattatcaaccggggtacatatgattgacatgctagttttacgattaccgttcatcgattctcttgtttgctccagactctcaggcaatgacctgatagcctttgtagagacctctcaaaaatagctaccctctccggcatgaatttatcagctagaacggttgaatatcatattgatggtgatttgactgtctccggcctttctcacccgtttgaatctttacctacacattactcaggcattgcatttaaaatatatgagggttctaaaaatttttatccttgcgttgaaataaaggcttctcccgcaaaagtattacagggtcataatgtttttggtacaaccgatttagctttatgctctgaggctttattgcttaattttgctaattctttgccttgcctgtatgatttattggatgttggaatcgcctgatgcggtattttctccttacgcatctgtgcggtatttcacaccgcatatggtgcactctcagtacaatctgctctgatgccgcatagttaagccagccccgacacccgccaacacccgctgacgcgccctgacgggcttgtctgctcccggcatccgcttacagacaagctgtgaccgtctccgggagctgcatgtgtcagaggttttcaccgtcatcaccgaaacgcgcgagacgaaagggcctcgtgatacgcctatttttataggttaatgtcatgataataatggtttcttagacgtcaggtggcacttttcggggaaatgtgcgcggaacccctatttgtttatttttctaaatacattcaaatatgtatccgctcatgagacaataaccctgataaatgcttcaataatattgaaaaaggaagagtatgagtattcaacatttccgtgtcgcccttattcccttttttgcggcattttgccttcctgtttttgctcacccagaaacgctggtgaaagtaaaagatgctgaagatcagttgggtgcacgagtgggttacatcgaactggatctcaacagcggtaagatccttgagagttttcgccccgaagaacgttttccaatgatgagcacttttaaagttctgctatgtggcgcggtattatcccgtattgacgccgggcaagagcaactcggtcgccgcatacactattctcagaatgacttggttgagtactcaccagtcacagaaaagcatcttacggatggcatgacagtaagagaattatgcagtgctgccataaccatgagtgataacactgcggccaacttacttctgacaacgatcggaggaccgaaggagctaaccgcttttttgcacaacatgggggatcatgtaactcgccttgatcgttgggaaccggagctgaatgaagccataccaaacgacgagcgtgacaccacgatgcctgtagcaatggcaacaacgttgcgcaaactattaactggcgaactacttactctagcttcccggcaacaattaatagactggatggaggcggataaagttgcaggaccacttctgcgctcggcccttccggctggctggtttattgctgataaatctggagccggtgagcgtgggtctcgcggtatcattgcagcactggggccagatggtaagccctcccgtatcgtagttatctacacgacggggagtcaggcaactatggatgaacgaaatagacagatcgctgagataggtgcctcactgattaagcattggtaactgtcagaccaagtttactcatatatactttagattgatttaaaacttcatttttaatttaaaaggatctaggtgaagatcctttttgataatctcatgaccaaaatcccttaacgtgagttttcgttccactgagcgtcagacccc

SEQ ID NO: 1450 - protein, 89 aa, Artificial Sequence
  naked FRB wild-type polypeptide
EMWHEGLEEASRLYFGERNVKGMFEVLEPLHAMMERGPQTLKETSFNQAYGRDLMEAQEWCRKYMKSGNVKDLTQAWDLYYHVFRRISK

SEQ ID NO: 1451 - DNA, 1212 bp, Artificial Sequence
  FRB-CISC having a truncated intracellular IL2Rbeta domain
gagatgtggcacgagggcctggaggaggccagcaggctgtattttggcgagcgcaacgtgaagggcatgttcgaggtgctggagcctctgcacgccatgatggagagaggcccacagaccctgaaggagacatcctttaaccaggcctatggacgggacctgatggaggcacaggagtggtgcagaaagtacatgaagtctggcaatgtgaaggacctgacgcaggcctgggatctgtactatcacgtgtttcggagaatctccaagggcaaagacacgattccgtggcttgggcatctgctcgttgggctgagtggtgcgtttggtttcatcatcttggtctatctcttgatcaattgcagaaatacaggcccttggctgaaaaaagtgctcaagtgtaatacccccgacccaagcaagttcttctcccagctttcttcagagcatggaggcgatgtgcagaaatggctctcttcaccttttccctcctcaagtttctccccgggagggctggcgcccgagatttcacctcttgaggtacttgaacgagacaaggttacccaacttctccttcaacaggataaggtacccgaacctgcgagccttagctccaaccactctcttacgagctgcttcaccaatcagggatacttctttttccaccttcccgatgcgctggaaatcgaagcatgtcaagtttactttacctatgatccatatagcgaggaagatcccgacgaaggagtcgccggtgcgcccacgggttcctcaccccaacctctccagcctctctcaggagaagatgatgcttattgcacttttcccagtagagacgatctcctcctcttttctccatctcttttggggggaccttcccccccttctacggcacctggcgggtctggtgctggcgaggagcggatgccgccgtccctccaggagcgagtaccacgagattgggatccccagccacttggaccaccaactccaggcgtacctgaccttgtcgattttcaacctccccctgaattggtgctgcgagaggctggggaggaagttccggacgctgggccgagggagggcgtgtcctttccatggagtaggcctccaggtcaaggcgagtttagggctctcaacgcgcggctgccgttgaatacagacgcttatctctcactgcaggaactgcaaggtcaggacccaacacatcttgta

SEQ ID NO: 1452 - DNA, 267 bp, Artificial Sequence
  FRB domain of polypeptide encoded by SEQ ID:1451
gagatgtggcacgagggcctggaggaggccagcaggctgtattttggcgagcgcaacgtgaagggcatgttcgaggtgctggagcctctgcacgccatgatggagagaggcccacagaccctgaaggagacatcctttaaccaggcctatggacgggacctgatggaggcacaggagtggtgcagaaagtacatgaagtctggcaatgtgaaggacctgacgcaggcctgggatctgtactatcacgtgtttcggagaatctccaag

SEQ ID NO: 1453 - DNA, 12 bp, Artificial Sequence
  IL2Rbeta domain of polypeptide encoded by SEQ ID:1451
ggcaaagacacg

SEQ ID NO: 1454 - DNA, 75 bp, Artificial Sequence
  Transmembrane domain of polypeptide encoded by SEQ ID:1451
attccgtggcttgggcatctgctcgttgggctgagtggtgcgtttggtttcatcatcttggtctatctcttgatc

SEQ ID NO: 1455 - DNA, 858 bp, Artificial Sequence
  Intracellular domain of polypeptide encoded by SEQ ID:1451
aattgcagaaatacaggcccttggctgaaaaaagtgctcaagtgtaatacccccgacccaagcaagttcttctcccagctttcttcagagcatggaggcgatgtgcagaaatggctctcttcaccttttccctcctcaagtttctccccgggagggctggcgcccgagatttcacctcttgaggtacttgaacgagacaaggttacccaacttctccttcaacaggataaggtacccgaacctgcgagccttagctccaaccactctcttacgagctgcttcaccaatcagggatacttctttttccaccttcccgatgcgctggaaatcgaagcatgtcaagtttactttacctatgatccatatagcgaggaagatcccgacgaaggagtcgccggtgcgcccacgggttcctcaccccaacctctccagcctctctcaggagaagatgatgcttattgcacttttcccagtagagacgatctcctcctcttttctccatctcttttggggggaccttcccccccttctacggcacctggcgggtctggtgctggcgaggagcggatgccgccgtccctccaggagcgagtaccacgagattgggatccccagccacttggaccaccaactccaggcgtacctgaccttgtcgattttcaacctccccctgaattggtgctgcgagaggctggggaggaagttccggacgctgggccgagggagggcgtgtcctttccatggagtaggcctccaggtcaaggcgagtttagggctctcaacgcgcggctgccgttgaatacagacgcttatctctcactgcaggaactgcaaggtcaggacccaacacatcttgta
